United States Patent Application Publication US 2015/0141320 A1 - sequence listing, part 53

SEQ ID NO: 2112779 - DNA, 15 bp, Homo sapiens
aggtgcttctcagaa

SEQ ID NO: 2112780 - DNA, 15 bp, Homo sapiens
ggtgcttctcagaag

SEQ ID NO: 2112781 - DNA, 15 bp, Homo sapiens
gtgcttctcagaagt

SEQ ID NO: 2112782 - DNA, 15 bp, Homo sapiens
tgcttctcagaagtc

SEQ ID NO: 2112783 - DNA, 15 bp, Homo sapiens
gcttctcagaagtct

SEQ ID NO: 2112784 - DNA, 15 bp, Homo sapiens
cttctcagaagtctg

SEQ ID NO: 2112785 - DNA, 15 bp, Homo sapiens
ttctcagaagtctgg

SEQ ID NO: 2112786 - DNA, 15 bp, Homo sapiens
tctcagaagtctggc

SEQ ID NO: 2112787 - DNA, 15 bp, Homo sapiens
ctcagaagtctggca

SEQ ID NO: 2112788 - DNA, 15 bp, Homo sapiens
tcagaagtctggcac

SEQ ID NO: 2112789 - DNA, 15 bp, Homo sapiens
cagaagtctggcaca

SEQ ID NO: 2112790 - DNA, 15 bp, Homo sapiens
agaagtctggcacat

SEQ ID NO: 2112791 - DNA, 15 bp, Homo sapiens
gaagtctggcacatc

SEQ ID NO: 2112792 - DNA, 15 bp, Homo sapiens
aagtctggcacatct

SEQ ID NO: 2112793 - DNA, 15 bp, Homo sapiens
agtctggcacatctg

SEQ ID NO: 2112794 - DNA, 15 bp, Homo sapiens
gtctggcacatctgt

SEQ ID NO: 2112795 - DNA, 15 bp, Homo sapiens
tctggcacatctgtg

SEQ ID NO: 2112796 - DNA, 15 bp, Homo sapiens
ctggcacatctgtgt

SEQ ID NO: 2112797 - DNA, 15 bp, Homo sapiens
tggcacatctgtgta

SEQ ID NO: 2112798 - DNA, 15 bp, Homo sapiens
ggcacatctgtgtat

SEQ ID NO: 2112799 - DNA, 15 bp, Homo sapiens
gcacatctgtgtatt

SEQ ID NO: 2112800 - DNA, 15 bp, Homo sapiens
cacatctgtgtattt

SEQ ID NO: 2112801 - DNA, 15 bp, Homo sapiens
acatctgtgtatttc

SEQ ID NO: 2112802 - DNA, 15 bp, Homo sapiens
catctgtgtatttct

SEQ ID NO: 2112803 - DNA, 15 bp, Homo sapiens
atctgtgtatttctt

SEQ ID NO: 2112804 - DNA, 15 bp, Homo sapiens
tctgtgtatttcttg

SEQ ID NO: 2112805 - DNA, 15 bp, Homo sapiens
ctgtgtatttcttgt

SEQ ID NO: 2112806 - DNA, 15 bp, Homo sapiens
tgtgtatttcttgtc

SEQ ID NO: 2112807 - DNA, 15 bp, Homo sapiens
gtgtatttcttgtct

SEQ ID NO: 2112808 - DNA, 15 bp, Homo sapiens
tgtatttcttgtcta

SEQ ID NO: 2112809 - DNA, 15 bp, Homo sapiens
gtatttcttgtctaa

SEQ ID NO: 2112810 - DNA, 15 bp, Homo sapiens
tatttcttgtctaat

SEQ ID NO: 2112811 - DNA, 15 bp, Homo sapiens
atttcttgtctaatt

SEQ ID NO: 2112812 - DNA, 15 bp, Homo sapiens
tttcttgtctaattc

SEQ ID NO: 2112813 - DNA, 15 bp, Homo sapiens
ttcttgtctaattct

SEQ ID NO: 2112814 - DNA, 15 bp, Homo sapiens
tcttgtctaattctt

SEQ ID NO: 2112815 - DNA, 15 bp, Homo sapiens
cttgtctaattcttc

SEQ ID NO: 2112816 - DNA, 15 bp, Homo sapiens
ttgtctaattcttct

SEQ ID NO: 2112817 - DNA, 15 bp, Homo sapiens
tgtctaattcttctc

SEQ ID NO: 2112818 - DNA, 15 bp, Homo sapiens
gtctaattcttctca

SEQ ID NO: 2112819 - DNA, 15 bp, Homo sapiens
tctaattcttctcat

SEQ ID NO: 2112820 - DNA, 15 bp, Homo sapiens
ctaattcttctcatt

SEQ ID NO: 2112821 - DNA, 15 bp, Homo sapiens
taattcttctcattg

SEQ ID NO: 2112822 - DNA, 15 bp, Homo sapiens
aattcttctcattgg

SEQ ID NO: 2112823 - DNA, 15 bp, Homo sapiens
attcttctcattggc

SEQ ID NO: 2112824 - DNA, 15 bp, Homo sapiens
ttcttctcattggcc

SEQ ID NO: 2112825 - DNA, 15 bp, Homo sapiens
tcttctcattggcct

SEQ ID NO: 2112826 - DNA, 15 bp, Homo sapiens
cttctcattggcctg

SEQ ID NO: 2112827 - DNA, 15 bp, Homo sapiens
ttctcattggcctgg

SEQ ID NO: 2112828 - DNA, 15 bp, Homo sapiens
tctcattggcctgga

SEQ ID NO: 2112829 - DNA, 15 bp, Homo sapiens
ctcattggcctggag

SEQ ID NO: 2112830 - DNA, 15 bp, Homo sapiens
tcattggcctggagc

SEQ ID NO: 2112831 - DNA, 15 bp, Homo sapiens
cattggcctggagca

SEQ ID NO: 2112832 - DNA, 15 bp, Homo sapiens
attggcctggagcat

SEQ ID NO: 2112833 - DNA, 15 bp, Homo sapiens
ttggcctggagcatc

SEQ ID NO: 2112834 - DNA, 15 bp, Homo sapiens
tggcctggagcatct

SEQ ID NO: 2112835 - DNA, 15 bp, Homo sapiens
ggcctggagcatctc

SEQ ID NO: 2112836 - DNA, 15 bp, Homo sapiens
gcctggagcatctct

SEQ ID NO: 2112837 - DNA, 15 bp, Homo sapiens
cctggagcatctctt

SEQ ID NO: 2112838 - DNA, 15 bp, Homo sapiens
ctggagcatctcttc

SEQ ID NO: 2112839 - DNA, 15 bp, Homo sapiens
tggagcatctcttca

SEQ ID NO: 2112840 - DNA, 15 bp, Homo sapiens
ggagcatctcttcac

SEQ ID NO: 2112841 - DNA, 15 bp, Homo sapiens
gagcatctcttcaca

SEQ ID NO: 2112842 - DNA, 15 bp, Homo sapiens
agcatctcttcacat

SEQ ID NO: 2112843 - DNA, 15 bp, Homo sapiens
gcatctcttcacatt

SEQ ID NO: 2112844 - DNA, 15 bp, Homo sapiens
catctcttcacattt

SEQ ID NO: 2112845 - DNA, 15 bp, Homo sapiens
atctcttcacatttt

SEQ ID NO: 2112846 - DNA, 15 bp, Homo sapiens
tctcttcacattttt

SEQ ID NO: 2112847 - DNA, 15 bp, Homo sapiens
ctcttcacatttttc

SEQ ID NO: 2112848 - DNA, 15 bp, Homo sapiens
tcttcacatttttct

SEQ ID NO: 2112849 - DNA, 15 bp, Homo sapiens
cttcacatttttctc

SEQ ID NO: 2112850 - DNA, 15 bp, Homo sapiens
ttcacatttttctct

SEQ ID NO: 2112851 - DNA, 15 bp, Homo sapiens
tcacatttttctcta

SEQ ID NO: 2112852 - DNA, 15 bp, Homo sapiens
cacatttttctctag

SEQ ID NO: 2112853 - DNA, 15 bp, Homo sapiens
acatttttctctaga

SEQ ID NO: 2112854 - DNA, 15 bp, Homo sapiens
catttttctctagag

SEQ ID NO: 2112855 - DNA, 15 bp, Homo sapiens
atttttctctagaga

SEQ ID NO: 2112856 - DNA, 15 bp, Homo sapiens
tttttctctagagag

SEQ ID NO: 2112857 - DNA, 15 bp, Homo sapiens
ttttctctagagagc

SEQ ID NO: 2112858 - DNA, 15 bp, Homo sapiens
tttctctagagagcc

SEQ ID NO: 2112859 - DNA, 15 bp, Homo sapiens
ttctctagagagcct

SEQ ID NO: 2112860 - DNA, 15 bp, Homo sapiens
tctctagagagcctg

SEQ ID NO: 2112861 - DNA, 15 bp, Homo sapiens
ctctagagagcctgg

SEQ ID NO: 2112862 - DNA, 15 bp, Homo sapiens
tctagagagcctggc

SEQ ID NO: 2112863 - DNA, 15 bp, Homo sapiens
ctagagagcctggca

SEQ ID NO: 2112864 - DNA, 15 bp, Homo sapiens
tagagagcctggcac

SEQ ID NO: 2112865 - DNA, 15 bp, Homo sapiens
agagagcctggcact

SEQ ID NO: 2112866 - DNA, 15 bp, Homo sapiens
gagagcctggcactt

SEQ ID NO: 2112867 - DNA, 15 bp, Homo sapiens
agagcctggcacttt

SEQ ID NO: 2112868 - DNA, 15 bp, Homo sapiens
gagcctggcactttt

SEQ ID NO: 2112869 - DNA, 15 bp, Homo sapiens
agcctggcacttttt

SEQ ID NO: 2112870 - DNA, 15 bp, Homo sapiens
gcctggcactttttt

SEQ ID NO: 2112871 - DNA, 15 bp, Homo sapiens
cctggcacttttttt

SEQ ID NO: 2112872 - DNA, 15 bp, Homo sapiens
ctggcactttttttt

SEQ ID NO: 2112873 - DNA, 15 bp, Homo sapiens
tggcacttttttttc

SEQ ID NO: 2112874 - DNA, 15 bp, Homo sapiens
ggcacttttttttcc

SEQ ID NO: 2112875 - DNA, 15 bp, Homo sapiens
gcacttttttttccc

SEQ ID NO: 2112876 - DNA, 15 bp, Homo sapiens
cacttttttttcccc

SEQ ID NO: 2112877 - DNA, 15 bp, Homo sapiens
acttttttttcccca

SEQ ID NO: 2112878 - DNA, 15 bp, Homo sapiens
cttttttttccccaa

SEQ ID NO: 2112879 - DNA, 15 bp, Homo sapiens
ttttttttccccaac

SEQ ID NO: 2112880 - DNA, 15 bp, Homo sapiens
tttttttccccaaca

SEQ ID NO: 2112881 - DNA, 15 bp, Homo sapiens
ttttttccccaacaa

SEQ ID NO: 2112882 - DNA, 15 bp, Homo sapiens
tttttccccaacaac

SEQ ID NO: 2112883 - DNA, 15 bp, Homo sapiens
ttttccccaacaacc

SEQ ID NO: 2112884 - DNA, 15 bp, Homo sapiens
tttccccaacaacct

SEQ ID NO: 2112885 - DNA, 15 bp, Homo sapiens
ttccccaacaacctg

SEQ ID NO: 2112886 - DNA, 15 bp, Homo sapiens
tccccaacaacctga

SEQ ID NO: 2112887 - DNA, 15 bp, Homo sapiens
ccccaacaacctgac

SEQ ID NO: 2112888 - DNA, 15 bp, Homo sapiens
cccaacaacctgacc

SEQ ID NO: 2112889 - DNA, 15 bp, Homo sapiens
ccaacaacctgacca

SEQ ID NO: 2112890 - DNA, 15 bp, Homo sapiens
caacaacctgaccat

SEQ ID NO: 2112891 - DNA, 15 bp, Homo sapiens
aacaacctgaccatt

SEQ ID NO: 2112892 - DNA, 15 bp, Homo sapiens
acaacctgaccattt

SEQ ID NO: 2112893 - DNA, 15 bp, Homo sapiens
caacctgaccatttt

SEQ ID NO: 2112894 - DNA, 15 bp, Homo sapiens
aacctgaccatttta

SEQ ID NO: 2112895 - DNA, 15 bp, Homo sapiens
acctgaccattttat

SEQ ID NO: 2112896 - DNA, 15 bp, Homo sapiens
cctgaccattttatc

SEQ ID NO: 2112897 - DNA, 15 bp, Homo sapiens
ctgaccattttatct

SEQ ID NO: 2112898 - DNA, 15 bp, Homo sapiens
tgaccattttatctt

SEQ ID NO: 2112899 - DNA, 15 bp, Homo sapiens
gaccattttatcttc

SEQ ID NO: 2112900 - DNA, 15 bp, Homo sapiens
accattttatcttct

SEQ ID NO: 2112901 - DNA, 15 bp, Homo sapiens
ccattttatcttctc

SEQ ID NO: 2112902 - DNA, 15 bp, Homo sapiens
cattttatcttctca

SEQ ID NO: 2112903 - DNA, 15 bp, Homo sapiens
attttatcttctcag

SEQ ID NO: 2112904 - DNA, 15 bp, Homo sapiens
ttttatcttctcagt

SEQ ID NO: 2112905 - DNA, 15 bp, Homo sapiens
tttatcttctcagtc

SEQ ID NO: 2112906 - DNA, 15 bp, Homo sapiens
ttatcttctcagtct

SEQ ID NO: 2112907 - DNA, 15 bp, Homo sapiens
tatcttctcagtcta

SEQ ID NO: 2112908 - DNA, 15 bp, Homo sapiens
atcttctcagtctag

SEQ ID NO: 2112909 - DNA, 15 bp, Homo sapiens
tcttctcagtctagg

SEQ ID NO: 2112910 - DNA, 15 bp, Homo sapiens
cttctcagtctaggg

SEQ ID NO: 2112911 - DNA, 15 bp, Homo sapiens
ttctcagtctagggc

SEQ ID NO: 2112912 - DNA, 15 bp, Homo sapiens
tctcagtctagggct

SEQ ID NO: 2112913 - DNA, 15 bp, Homo sapiens
ctcagtctagggctt

SEQ ID NO: 2112914 - DNA, 15 bp, Homo sapiens
tcagtctagggcttc

SEQ ID NO: 2112915 - DNA, 15 bp, Homo sapiens
cagtctagggcttct

SEQ ID NO: 2112916 - DNA, 15 bp, Homo sapiens
agtctagggcttctg

SEQ ID NO: 2112917 - DNA, 15 bp, Homo sapiens
gtctagggcttctgg

SEQ ID NO: 2112918 - DNA, 15 bp, Homo sapiens
tctagggcttctggg

SEQ ID NO: 2112919 - DNA, 15 bp, Homo sapiens
ctagggcttctgggg

SEQ ID NO: 2112920 - DNA, 15 bp, Homo sapiens
tagggcttctggggt

SEQ ID NO: 2112921 - DNA, 15 bp, Homo sapiens
agggcttctggggtc

SEQ ID NO: 2112922 - DNA, 15 bp, Homo sapiens
gggcttctggggtca

SEQ ID NO: 2112923 - DNA, 15 bp, Homo sapiens
ggcttctggggtcaa

SEQ ID NO: 2112924 - DNA, 15 bp, Homo sapiens
gcttctggggtcaaa

SEQ ID NO: 2112925 - DNA, 15 bp, Homo sapiens
cttctggggtcaaaa

SEQ ID NO: 2112926 - DNA, 15 bp, Homo sapiens
ttctggggtcaaaag

SEQ ID NO: 2112927 - DNA, 15 bp, Homo sapiens
tctggggtcaaaaga

SEQ ID NO: 2112928 - DNA, 15 bp, Homo sapiens
ctggggtcaaaagaa

SEQ ID NO: 2112929 - DNA, 15 bp, Homo sapiens
tggggtcaaaagaaa

SEQ ID NO: 2112930 - DNA, 15 bp, Homo sapiens
ggggtcaaaagaaag

SEQ ID NO: 2112931 - DNA, 15 bp, Homo sapiens
gggtcaaaagaaagg

SEQ ID NO: 2112932 - DNA, 15 bp, Homo sapiens
ggtcaaaagaaagga

SEQ ID NO: 2112933 - DNA, 15 bp, Homo sapiens
gtcaaaagaaaggac

SEQ ID NO: 2112934 - DNA, 15 bp, Homo sapiens
tcaaaagaaaggact

SEQ ID NO: 2112935 - DNA, 15 bp, Homo sapiens
caaaagaaaggactg

SEQ ID NO: 2112936 - DNA, 15 bp, Homo sapiens
aaaagaaaggactga

SEQ ID NO: 2112937 - DNA, 15 bp, Homo sapiens
aaagaaaggactgaa

SEQ ID NO: 2112938 - DNA, 15 bp, Homo sapiens
aagaaaggactgaaa

SEQ ID NO: 2112939 - DNA, 15 bp, Homo sapiens
agaaaggactgaaat

SEQ ID NO: 2112940 - DNA, 15 bp, Homo sapiens
gaaaggactgaaata

SEQ ID NO: 2112941 - DNA, 15 bp, Homo sapiens
aaaggactgaaatac

SEQ ID NO: 2112942 - DNA, 15 bp, Homo sapiens
aaggactgaaataca

SEQ ID NO: 2112943 - DNA, 15 bp, Homo sapiens
aggactgaaatacag

SEQ ID NO: 2112944 - DNA, 15 bp, Homo sapiens
ggactgaaatacagt

SEQ ID NO: 2112945 - DNA, 15 bp, Homo sapiens
gactgaaatacagta

SEQ ID NO: 2112946 - DNA, 15 bp, Homo sapiens
actgaaatacagtat

SEQ ID NO: 2112947 - DNA, 15 bp, Homo sapiens
ctgaaatacagtatc

SEQ ID NO: 2112948 - DNA, 15 bp, Homo sapiens
tgaaatacagtatca

SEQ ID NO: 2112949 - DNA, 15 bp, Homo sapiens
gaaatacagtatcac

SEQ ID NO: 2112950 - DNA, 15 bp, Homo sapiens
aaatacagtatcacc

SEQ ID NO: 2112951 - DNA, 15 bp, Homo sapiens
aatacagtatcacct

SEQ ID NO: 2112952 - DNA, 15 bp, Homo sapiens
atacagtatcaccta

SEQ ID NO: 2112953 - DNA, 15 bp, Homo sapiens
tacagtatcacctat

SEQ ID NO: 2112954 - DNA, 15 bp, Homo sapiens
acagtatcacctata

SEQ ID NO: 2112955 - DNA, 15 bp, Homo sapiens
cagtatcacctatat

SEQ ID NO: 2112956 - DNA, 15 bp, Homo sapiens
agtatcacctatatg

SEQ ID NO: 2112957 - DNA, 15 bp, Homo sapiens
gtatcacctatatga

SEQ ID NO: 2112958 - DNA, 15 bp, Homo sapiens
tatcacctatatgaa

SEQ ID NO: 2112959 - DNA, 15 bp, Homo sapiens
atcacctatatgaat

SEQ ID NO: 2112960 - DNA, 15 bp, Homo sapiens
tcacctatatgaatg

SEQ ID NO: 2112961 - DNA, 15 bp, Homo sapiens
cacctatatgaatgt

SEQ ID NO: 2112962 - DNA, 15 bp, Homo sapiens
acctatatgaatgtc

SEQ ID NO: 2112963 - DNA, 15 bp, Homo sapiens
cctatatgaatgtct

SEQ ID NO: 2112964 - DNA, 15 bp, Homo sapiens
ctatatgaatgtctg

SEQ ID NO: 2112965 - DNA, 15 bp, Homo sapiens
tatatgaatgtctgc

SEQ ID NO: 2112966 - DNA, 15 bp, Homo sapiens
atatgaatgtctgct

SEQ ID NO: 2112967 - DNA, 15 bp, Homo sapiens
tatgaatgtctgctc

SEQ ID NO: 2112968 - DNA, 15 bp, Homo sapiens
atgaatgtctgctcc

SEQ ID NO: 2112969 - DNA, 15 bp, Homo sapiens
tgaatgtctgctcct

SEQ ID NO: 2112970 - DNA, 15 bp, Homo sapiens
gaatgtctgctcctg

SEQ ID NO: 2112971 - DNA, 15 bp, Homo sapiens
aatgtctgctcctga

SEQ ID NO: 2112972 - DNA, 15 bp, Homo sapiens
atgtctgctcctgag

SEQ ID NO: 2112973 - DNA, 15 bp, Homo sapiens
tgtctgctcctgagg

SEQ ID NO: 2112974 - DNA, 15 bp, Homo sapiens
gtctgctcctgaggg

SEQ ID NO: 2112975 - DNA, 15 bp, Homo sapiens
tctgctcctgaggga

SEQ ID NO: 2112976 - DNA, 15 bp, Homo sapiens
ctgctcctgagggaa

SEQ ID NO: 2112977 - DNA, 15 bp, Homo sapiens
tgctcctgagggaag

SEQ ID NO: 2112978 - DNA, 15 bp, Homo sapiens
gctcctgagggaagt

SEQ ID NO: 2112979 - DNA, 15 bp, Homo sapiens
ctcctgagggaagtt

SEQ ID NO: 2112980 - DNA, 15 bp, Homo sapiens
tcctgagggaagtta

SEQ ID NO: 2112981 - DNA, 15 bp, Homo sapiens
cctgagggaagttaa

SEQ ID NO: 2112982 - DNA, 15 bp, Homo sapiens
ctgagggaagttaac

SEQ ID NO: 2112983 - DNA, 15 bp, Homo sapiens
tgagggaagttaaca

SEQ ID NO: 2112984 - DNA, 15 bp, Homo sapiens
gagggaagttaacaa

SEQ ID NO: 2112985 - DNA, 15 bp, Homo sapiens
agggaagttaacaaa

SEQ ID NO: 2112986 - DNA, 15 bp, Homo sapiens
gggaagttaacaaaa

SEQ ID NO: 2112987 - DNA, 15 bp, Homo sapiens
ggaagttaacaaaag

SEQ ID NO: 2112988 - DNA, 15 bp, Homo sapiens
gaagttaacaaaagc

SEQ ID NO: 2112989 - DNA, 15 bp, Homo sapiens
aagttaacaaaagcc

SEQ ID NO: 2112990 - DNA, 15 bp, Homo sapiens
agttaacaaaagcca

SEQ ID NO: 2112991 - DNA, 15 bp, Homo sapiens
gttaacaaaagccag

SEQ ID NO: 2112992 - DNA, 15 bp, Homo sapiens
ttaacaaaagccaga

SEQ ID NO: 2112993 - DNA, 15 bp, Homo sapiens
taacaaaagccagat

SEQ ID NO: 2112994 - DNA, 15 bp, Homo sapiens
aacaaaagccagatt

SEQ ID NO: 2112995 - DNA, 15 bp, Homo sapiens
acaaaagccagatta

SEQ ID NO: 2112996 - DNA, 15 bp, Homo sapiens
caaaagccagattag

SEQ ID NO: 2112997 - DNA, 15 bp, Homo sapiens
aaaagccagattaga

SEQ ID NO: 2112998 - DNA, 15 bp, Homo sapiens
aaagccagattagat

SEQ ID NO: 2112999 - DNA, 15 bp, Homo sapiens
aagccagattagata

SEQ ID NO: 2113000 - DNA, 15 bp, Homo sapiens
agccagattagatac

SEQ ID NO: 2113001 - DNA, 15 bp, Homo sapiens
gccagattagatact

SEQ ID NO: 2113002 - DNA, 15 bp, Homo sapiens
ccagattagatactg

SEQ ID NO: 2113003 - DNA, 15 bp, Homo sapiens
cagattagatactga

SEQ ID NO: 2113004 - DNA, 15 bp, Homo sapiens
agattagatactgac

SEQ ID NO: 2113005 - DNA, 15 bp, Homo sapiens
gattagatactgact

SEQ ID NO: 2113006 - DNA, 15 bp, Homo sapiens
attagatactgactg

SEQ ID NO: 2113007 - DNA, 15 bp, Homo sapiens
ttagatactgactgg

SEQ ID NO: 2113008 - DNA, 15 bp, Homo sapiens
tagatactgactgga

SEQ ID NO: 2113009 - DNA, 15 bp, Homo sapiens
agatactgactggat

SEQ ID NO: 2113010 - DNA, 15 bp, Homo sapiens
gatactgactggatt

SEQ ID NO: 2113011 - DNA, 15 bp, Homo sapiens
atactgactggattt

SEQ ID NO: 2113012 - DNA, 15 bp, Homo sapiens
tactgactggatttt

SEQ ID NO: 2113013 - DNA, 15 bp, Homo sapiens
actgactggattttg

SEQ ID NO: 2113014 - DNA, 15 bp, Homo sapiens
ctgactggattttgg

SEQ ID NO: 2113015 - DNA, 15 bp, Homo sapiens
tgactggattttggt

SEQ ID NO: 2113016 - DNA, 15 bp, Homo sapiens
gactggattttggtg

SEQ ID NO: 2113017 - DNA, 15 bp, Homo sapiens
actggattttggtgt

SEQ ID NO: 2113018 - DNA, 15 bp, Homo sapiens
ctggattttggtgtc

SEQ ID NO: 2113019 - DNA, 15 bp, Homo sapiens
tggattttggtgtct

SEQ ID NO: 2113020 - DNA, 15 bp, Homo sapiens
ggattttggtgtctc

SEQ ID NO: 2113021 - DNA, 15 bp, Homo sapiens
gattttggtgtctct

SEQ ID NO: 2113022 - DNA, 15 bp, Homo sapiens
attttggtgtctctc

SEQ ID NO: 2113023 - DNA, 15 bp, Homo sapiens
ttttggtgtctctct

SEQ ID NO: 2113024 - DNA, 15 bp, Homo sapiens
tttggtgtctctctc

SEQ ID NO: 2113025 - DNA, 15 bp, Homo sapiens
ttggtgtctctctca

SEQ ID NO: 2113026 - DNA, 15 bp, Homo sapiens
tggtgtctctctcaa

SEQ ID NO: 2113027 - DNA, 15 bp, Homo sapiens
ggtgtctctctcaag

SEQ ID NO: 2113028 - DNA, 15 bp, Homo sapiens
gtgtctctctcaagt

SEQ ID NO: 2113029 - DNA, 15 bp, Homo sapiens
tgtctctctcaagtg

SEQ ID NO: 2113030 - DNA, 15 bp, Homo sapiens
gtctctctcaagtgg

SEQ ID NO: 2113031 - DNA, 15 bp, Homo sapiens
tctctctcaagtgga

SEQ ID NO: 2113032 - DNA, 15 bp, Homo sapiens
ctctctcaagtggag

SEQ ID NO: 2113033 - DNA, 15 bp, Homo sapiens
tctctcaagtggaga

SEQ ID NO: 2113034 - DNA, 15 bp, Homo sapiens
ctctcaagtggagaa

SEQ ID NO: 2113035 - DNA, 15 bp, Homo sapiens
tctcaagtggagaag

SEQ ID NO: 2113036 - DNA, 15 bp, Homo sapiens
ctcaagtggagaaga

SEQ ID NO: 2113037 - DNA, 15 bp, Homo sapiens
tcaagtggagaagat

SEQ ID NO: 2113038 - DNA, 15 bp, Homo sapiens
caagtggagaagatg

SEQ ID NO: 2113039 - DNA, 15 bp, Homo sapiens
aagtggagaagatgt

SEQ ID NO: 2113040 - DNA, 15 bp, Homo sapiens
agtggagaagatgtg

SEQ ID NO: 2113041 - DNA, 15 bp, Homo sapiens
gtggagaagatgtga

SEQ ID NO: 2113042 - DNA, 15 bp, Homo sapiens
tggagaagatgtgaa

SEQ ID NO: 2113043 - DNA, 15 bp, Homo sapiens
ggagaagatgtgaat

SEQ ID NO: 2113044 - DNA, 15 bp, Homo sapiens
gagaagatgtgaata

SEQ ID NO: 2113045 - DNA, 15 bp, Homo sapiens
agaagatgtgaatag

SEQ ID NO: 2113046 - DNA, 15 bp, Homo sapiens
gaagatgtgaataga

SEQ ID NO: 2113047 - DNA, 15 bp, Homo sapiens
aagatgtgaatagaa

SEQ ID NO: 2113048 - DNA, 15 bp, Homo sapiens
agatgtgaatagaaa

SEQ ID NO: 2113049 - DNA, 15 bp, Homo sapiens
gatgtgaatagaaac

SEQ ID NO: 2113050 - DNA, 15 bp, Homo sapiens
atgtgaatagaaaca

SEQ ID NO: 2113051 - DNA, 15 bp, Homo sapiens
tgtgaatagaaacag

SEQ ID NO: 2113052 - DNA, 15 bp, Homo sapiens
gtgaatagaaacaga

SEQ ID NO: 2113053 - DNA, 15 bp, Homo sapiens
tgaatagaaacagaa

SEQ ID NO: 2113054 - DNA, 15 bp, Homo sapiens
gaatagaaacagaag

SEQ ID NO: 2113055 - DNA, 15 bp, Homo sapiens
aatagaaacagaagt

SEQ ID NO: 2113056 - DNA, 15 bp, Homo sapiens
atagaaacagaagtt

SEQ ID NO: 2113057 - DNA, 15 bp, Homo sapiens
tagaaacagaagttt

SEQ ID NO: 2113058 - DNA, 15 bp, Homo sapiens
agaaacagaagttta

SEQ ID NO: 2113059 - DNA, 15 bp, Homo sapiens
gaaacagaagtttac

SEQ ID NO: 2113060 - DNA, 15 bp, Homo sapiens
aaacagaagtttaca

SEQ ID NO: 2113061 - DNA, 15 bp, Homo sapiens
aacagaagtttacaa

SEQ ID NO: 2113062 - DNA, 15 bp, Homo sapiens
acagaagtttacaaa

SEQ ID NO: 2113063 - DNA, 15 bp, Homo sapiens
cagaagtttacaaaa

SEQ ID NO: 2113064 - DNA, 15 bp, Homo sapiens
agaagtttacaaaac

SEQ ID NO: 2113065 - DNA, 15 bp, Homo sapiens
gaagtttacaaaaca

SEQ ID NO: 2113066 - DNA, 15 bp, Homo sapiens
aagtttacaaaacac

SEQ ID NO: 2113067 - DNA, 15 bp, Homo sapiens
agtttacaaaacact

SEQ ID NO: 2113068 - DNA, 15 bp, Homo sapiens
gtttacaaaacacta

SEQ ID NO: 2113069 - DNA, 15 bp, Homo sapiens
tttacaaaacactat

SEQ ID NO: 2113070 - DNA, 15 bp, Homo sapiens
ttacaaaacactata

SEQ ID NO: 2113071 - DNA, 15 bp, Homo sapiens
tacaaaacactatag

SEQ ID NO: 2113072 - DNA, 15 bp, Homo sapiens
acaaaacactatagc

SEQ ID NO: 2113073 - DNA, 15 bp, Homo sapiens
caaaacactatagcc

SEQ ID NO: 2113074 - DNA, 15 bp, Homo sapiens
aaaacactatagcct

SEQ ID NO: 2113075 - DNA, 15 bp, Homo sapiens
aaacactatagccta

SEQ ID NO: 2113076 - DNA, 15 bp, Homo sapiens
aacactatagcctaa

SEQ ID NO: 2113077 - DNA, 15 bp, Homo sapiens
acactatagcctaac

SEQ ID NO: 2113078 - DNA, 15 bp, Homo sapiens
cactatagcctaaca

SEQ ID NO: 2113079 - DNA, 15 bp, Homo sapiens
actatagcctaacaa

SEQ ID NO: 2113080 - DNA, 15 bp, Homo sapiens
ctatagcctaacaaa

SEQ ID NO: 2113081 - DNA, 15 bp, Homo sapiens
tatagcctaacaaat

SEQ ID NO: 2113082 - DNA, 15 bp, Homo sapiens
atagcctaacaaata

SEQ ID NO: 2113083 - DNA, 15 bp, Homo sapiens
tagcctaacaaatag

SEQ ID NO: 2113084 - DNA, 15 bp, Homo sapiens
agcctaacaaatagg

SEQ ID NO: 2113085 - DNA, 15 bp, Homo sapiens
gcctaacaaataggt

SEQ ID NO: 2113086 - DNA, 15 bp, Homo sapiens
cctaacaaataggta

SEQ ID NO: 2113087 - DNA, 15 bp, Homo sapiens
ctaacaaataggtaa

SEQ ID NO: 2113088 - DNA, 15 bp, Homo sapiens
taacaaataggtaaa

SEQ ID NO: 2113089 - DNA, 15 bp, Homo sapiens
aacaaataggtaaaa

SEQ ID NO: 2113090 - DNA, 15 bp, Homo sapiens
acaaataggtaaaag

SEQ ID NO: 2113091 - DNA, 15 bp, Homo sapiens
caaataggtaaaagc

SEQ ID NO: 2113092 - DNA, 15 bp, Homo sapiens
aaataggtaaaagct

SEQ ID NO: 2113093 - DNA, 15 bp, Homo sapiens
aataggtaaaagctg

SEQ ID NO: 2113094 - DNA, 15 bp, Homo sapiens
ataggtaaaagctgt

SEQ ID NO: 2113095 - DNA, 15 bp, Homo sapiens
taggtaaaagctgtg

SEQ ID NO: 2113096 - DNA, 15 bp, Homo sapiens
aggtaaaagctgtga

SEQ ID NO: 2113097 - DNA, 15 bp, Homo sapiens
cccacatatgcaaag

SEQ ID NO: 2113098 - DNA, 15 bp, Homo sapiens
ccacatatgcaaaga

SEQ ID NO: 2113099 - DNA, 15 bp, Homo sapiens
cacatatgcaaagaa

SEQ ID NO: 2113100 - DNA, 15 bp, Homo sapiens
acatatgcaaagaaa

SEQ ID NO: 2113101 - DNA, 15 bp, Homo sapiens
catatgcaaagaaat

SEQ ID NO: 2113102 - DNA, 15 bp, Homo sapiens
atatgcaaagaaata

SEQ ID NO: 2113103 - DNA, 15 bp, Homo sapiens
tatgcaaagaaatat

SEQ ID NO: 2113104 - DNA, 15 bp, Homo sapiens
atgcaaagaaatatt

SEQ ID NO: 2113105 - DNA, 15 bp, Homo sapiens
tgcaaagaaatattt

SEQ ID NO: 2113106 - DNA, 15 bp, Homo sapiens
gcaaagaaatattta

SEQ ID NO: 2113107 - DNA, 15 bp, Homo sapiens
caaagaaatatttaa

SEQ ID NO: 2113108 - DNA, 15 bp, Homo sapiens
aaagaaatatttaag

SEQ ID NO: 2113109 - DNA, 15 bp, Homo sapiens
aagaaatatttaagg

SEQ ID NO: 2113110 - DNA, 15 bp, Homo sapiens
agaaatatttaagga

SEQ ID NO: 2113111 - DNA, 15 bp, Homo sapiens
gaaatatttaaggag

SEQ ID NO: 2113112 - DNA, 15 bp, Homo sapiens
aaatatttaaggaga

SEQ ID NO: 2113113 - DNA, 15 bp, Homo sapiens
aatatttaaggagag

SEQ ID NO: 2113114 - DNA, 15 bp, Homo sapiens
atatttaaggagaga

SEQ ID NO: 2113115 - DNA, 15 bp, Homo sapiens
tatttaaggagagat

SEQ ID NO: 2113116 - DNA, 15 bp, Homo sapiens
atttaaggagagatt

SEQ ID NO: 2113117 - DNA, 15 bp, Homo sapiens
tttaaggagagatta

SEQ ID NO: 2113118 - DNA, 15 bp, Homo sapiens
ttaaggagagattac

SEQ ID NO: 2113119 - DNA, 15 bp, Homo sapiens
taaggagagattaca

SEQ ID NO: 2113120 - DNA, 15 bp, Homo sapiens
aaggagagattacat

SEQ ID NO: 2113121 - DNA, 15 bp, Homo sapiens
aggagagattacatg

SEQ ID NO: 2113122 - DNA, 15 bp, Homo sapiens
ggagagattacatga

SEQ ID NO: 2113123 - DNA, 15 bp, Homo sapiens
gagagattacatgaa

SEQ ID NO: 2113124 - DNA, 15 bp, Homo sapiens
agagattacatgaaa

SEQ ID NO: 2113125 - DNA, 15 bp, Homo sapiens
gagattacatgaaat

SEQ ID NO: 2113126 - DNA, 15 bp, Homo sapiens
agattacatgaaatc

SEQ ID NO: 2113127 - DNA, 15 bp, Homo sapiens
gattacatgaaatca

SEQ ID NO: 2113128 - DNA, 15 bp, Homo sapiens
attacatgaaatcaa

SEQ ID NO: 2113129 - DNA, 15 bp, Homo sapiens
ttacatgaaatcaaa

SEQ ID NO: 2113130 - DNA, 15 bp, Homo sapiens
tacatgaaatcaaag

SEQ ID NO: 2113131 - DNA, 15 bp, Homo sapiens
acatgaaatcaaaga

SEQ ID NO: 2113132 - DNA, 15 bp, Homo sapiens
catgaaatcaaagag

SEQ ID NO: 2113133 - DNA, 15 bp, Homo sapiens
atgaaatcaaagaga

SEQ ID NO: 2113134 - DNA, 15 bp, Homo sapiens
tgaaatcaaagagag

SEQ ID NO: 2113135 - DNA, 15 bp, Homo sapiens
gaaatcaaagagagg

SEQ ID NO: 2113136 - DNA, 15 bp, Homo sapiens
aaatcaaagagaggg

SEQ ID NO: 2113137 - DNA, 15 bp, Homo sapiens
aatcaaagagaggga

SEQ ID NO: 2113138 - DNA, 15 bp, Homo sapiens
atcaaagagagggag

SEQ ID NO: 2113139 - DNA, 15 bp, Homo sapiens
tcaaagagagggaga

SEQ ID NO: 2113140 - DNA, 15 bp, Homo sapiens
caaagagagggagat

SEQ ID NO: 2113141 - DNA, 15 bp, Homo sapiens
aaagagagggagata

SEQ ID NO: 2113142 - DNA, 15 bp, Homo sapiens
aagagagggagatag

SEQ ID NO: 2113143 - DNA, 15 bp, Homo sapiens
agagagggagataga

SEQ ID NO: 2113144 - DNA, 15 bp, Homo sapiens
gagagggagatagat

SEQ ID NO: 2113145 - DNA, 15 bp, Homo sapiens
agagggagatagatt

SEQ ID NO: 2113146 - DNA, 15 bp, Homo sapiens
gagggagatagattc

SEQ ID NO: 2113147 - DNA, 15 bp, Homo sapiens
agggagatagattca

SEQ ID NO: 2113148 - DNA, 15 bp, Homo sapiens
gggagatagattcat

SEQ ID NO: 2113149 - DNA, 15 bp, Homo sapiens
ggagatagattcatg

SEQ ID NO: 2113150 - DNA, 15 bp, Homo sapiens
gagatagattcatga

SEQ ID NO: 2113151 - DNA, 15 bp, Homo sapiens
agatagattcatgaa

SEQ ID NO: 2113152 - DNA, 15 bp, Homo sapiens
gatagattcatgaag

SEQ ID NO: 2113153 - DNA, 15 bp, Homo sapiens
atagattcatgaaga

SEQ ID NO: 2113154 - DNA, 15 bp, Homo sapiens
tagattcatgaagag

SEQ ID NO: 2113155 - DNA, 15 bp, Homo sapiens
agattcatgaagagg

SEQ ID NO: 2113156 - DNA, 15 bp, Homo sapiens
gattcatgaagaggc

SEQ ID NO: 2113157 - DNA, 15 bp, Homo sapiens
attcatgaagaggct

SEQ ID NO: 2113158 - DNA, 15 bp, Homo sapiens
ttcatgaagaggctg

SEQ ID NO: 2113159 - DNA, 15 bp, Homo sapiens
tcatgaagaggctga

SEQ ID NO: 2113160 - DNA, 15 bp, Homo sapiens
catgaagaggctgaa

SEQ ID NO: 2113161 - DNA, 15 bp, Homo sapiens
atgaagaggctgaaa

SEQ ID NO: 2113162 - DNA, 15 bp, Homo sapiens
tgaagaggctgaaat

SEQ ID NO: 2113163 - DNA, 15 bp, Homo sapiens
gaagaggctgaaata

SEQ ID NO: 2113164 - DNA, 15 bp, Homo sapiens
aagaggctgaaatac

SEQ ID NO: 2113165 - DNA, 15 bp, Homo sapiens
agaggctgaaatact

SEQ ID NO: 2113166 - DNA, 15 bp, Homo sapiens
gaggctgaaatactc

SEQ ID NO: 2113167 - DNA, 15 bp, Homo sapiens
aggctgaaatactca

SEQ ID NO: 2113168 - DNA, 15 bp, Homo sapiens
ggctgaaatactcaa

SEQ ID NO: 2113169 - DNA, 15 bp, Homo sapiens
gctgaaatactcaaa

SEQ ID NO: 2113170 - DNA, 15 bp, Homo sapiens
ctgaaatactcaaag

SEQ ID NO: 2113171 - DNA, 15 bp, Homo sapiens
tgaaatactcaaagg

SEQ ID NO: 2113172 - DNA, 15 bp, Homo sapiens
gaaatactcaaaggt

SEQ ID NO: 2113173 - DNA, 15 bp, Homo sapiens
aaatactcaaaggtg

SEQ ID NO: 2113174 - DNA, 15 bp, Homo sapiens
aatactcaaaggtga

SEQ ID NO: 2113175 - DNA, 15 bp, Homo sapiens
atactcaaaggtgag

SEQ ID NO: 2113176 - DNA, 15 bp, Homo sapiens
tactcaaaggtgagt

SEQ ID NO: 2113177 - DNA, 15 bp, Homo sapiens
actcaaaggtgagta

SEQ ID NO: 2113178 - DNA, 15 bp, Homo sapiens
ctcaaaggtgagtag

SEQ ID NO: 2113179 - DNA, 15 bp, Homo sapiens
tcaaaggtgagtaga

SEQ ID NO: 2113180 - DNA, 15 bp, Homo sapiens
caaaggtgagtagaa

SEQ ID NO: 2113181 - DNA, 15 bp, Homo sapiens
aaaggtgagtagaaa

SEQ ID NO: 2113182 - DNA, 15 bp, Homo sapiens
aaggtgagtagaaag

SEQ ID NO: 2113183 - DNA, 15 bp, Homo sapiens
aggtgagtagaaagg

SEQ ID NO: 2113184 - DNA, 15 bp, Homo sapiens
ggtgagtagaaaggg

SEQ ID NO: 2113185 - DNA, 15 bp, Homo sapiens
gtgagtagaaaggga

SEQ ID NO: 2113186 - DNA, 15 bp, Homo sapiens
tgagtagaaagggaa

SEQ ID NO: 2113187 - DNA, 15 bp, Homo sapiens
gagtagaaagggaag

SEQ ID NO: 2113188 - DNA, 15 bp, Homo sapiens
agtagaaagggaaga

SEQ ID NO: 2113189 - DNA, 15 bp, Homo sapiens
gtagaaagggaagaa

SEQ ID NO: 2113190 - DNA, 15 bp, Homo sapiens
tagaaagggaagaag

SEQ ID NO: 2113191 - DNA, 15 bp, Homo sapiens
agaaagggaagaagc

SEQ ID NO: 2113192 - DNA, 15 bp, Homo sapiens
gaaagggaagaagca

SEQ ID NO: 2113193 - DNA, 15 bp, Homo sapiens
aaagggaagaagcag

SEQ ID NO: 2113194 - DNA, 15 bp, Homo sapiens
aagggaagaagcaga

SEQ ID NO: 2113195 - DNA, 15 bp, Homo sapiens
agggaagaagcagag

SEQ ID NO: 2113196 - DNA, 15 bp, Homo sapiens
gggaagaagcagaga

SEQ ID NO: 2113197 - DNA, 15 bp, Homo sapiens
ggaagaagcagagaa

SEQ ID NO: 2113198 - DNA, 15 bp, Homo sapiens
gaagaagcagagaac

SEQ ID NO: 2113199 - DNA, 15 bp, Homo sapiens
aagaagcagagaaca

SEQ ID NO: 2113200 - DNA, 15 bp, Homo sapiens
agaagcagagaacaa

SEQ ID NO: 2113201 - DNA, 15 bp, Homo sapiens
gaagcagagaacaaa

SEQ ID NO: 2113202 - DNA, 15 bp, Homo sapiens
aagcagagaacaaat

SEQ ID NO: 2113203 - DNA, 15 bp, Homo sapiens
agcagagaacaaata

SEQ ID NO: 2113204 - DNA, 15 bp, Homo sapiens
gcagagaacaaatac

SEQ ID NO: 2113205 - DNA, 15 bp, Homo sapiens
cagagaacaaataca

SEQ ID NO: 2113206 - DNA, 15 bp, Homo sapiens
agagaacaaatacaa

SEQ ID NO: 2113207 - DNA, 15 bp, Homo sapiens
gagaacaaatacaag

SEQ ID NO: 2113208 - DNA, 15 bp, Homo sapiens
agaacaaatacaagc

SEQ ID NO: 2113209 - DNA, 15 bp, Homo sapiens
gaacaaatacaagcc

SEQ ID NO: 2113210 - DNA, 15 bp, Homo sapiens
aacaaatacaagcca

SEQ ID NO: 2113211 - DNA, 15 bp, Homo sapiens
acaaatacaagccaa

SEQ ID NO: 2113212 - DNA, 15 bp, Homo sapiens
caaatacaagccaac

SEQ ID NO: 2113213 - DNA, 15 bp, Homo sapiens
aaatacaagccaaca

SEQ ID NO: 2113214 - DNA, 15 bp, Homo sapiens
aatacaagccaacag

SEQ ID NO: 2113215 - DNA, 15 bp, Homo sapiens
atacaagccaacaga

SEQ ID NO: 2113216 - DNA, 15 bp, Homo sapiens
tacaagccaacagag

SEQ ID NO: 2113217 - DNA, 15 bp, Homo sapiens
acaagccaacagaga

SEQ ID NO: 2113218 - DNA, 15 bp, Homo sapiens
caagccaacagagat

SEQ ID NO: 2113219 - DNA, 15 bp, Homo sapiens
aagccaacagagatt

SEQ ID NO: 2113220 - DNA, 15 bp, Homo sapiens
agccaacagagatta

SEQ ID NO: 2113221 - DNA, 15 bp, Homo sapiens
gccaacagagattaa

SEQ ID NO: 2113222 - DNA, 15 bp, Homo sapiens
ccaacagagattaat

SEQ ID NO: 2113223 - DNA, 15 bp, Homo sapiens
caacagagattaata

SEQ ID NO: 2113224 - DNA, 15 bp, Homo sapiens
aacagagattaatac

SEQ ID NO: 2113225 - DNA, 15 bp, Homo sapiens
acagagattaatact

SEQ ID NO: 2113226 - DNA, 15 bp, Homo sapiens
cagagattaatactg

SEQ ID NO: 2113227 - DNA, 15 bp, Homo sapiens
agagattaatactga

SEQ ID NO: 2113228 - DNA, 15 bp, Homo sapiens
gagattaatactgaa

SEQ ID NO: 2113229 - DNA, 15 bp, Homo sapiens
agattaatactgaaa

SEQ ID NO: 2113230 - DNA, 15 bp, Homo sapiens
gattaatactgaaat

SEQ ID NO: 2113231 - DNA, 15 bp, Homo sapiens
attaatactgaaata

SEQ ID NO: 2113232 - DNA, 15 bp, Homo sapiens
ttaatactgaaatag

SEQ ID NO: 2113233 - DNA, 15 bp, Homo sapiens
taatactgaaataga

SEQ ID NO: 2113234 - DNA, 15 bp, Homo sapiens
aatactgaaatagaa

SEQ ID NO: 2113235 - DNA, 15 bp, Homo sapiens
atactgaaatagaaa

SEQ ID NO: 2113236 - DNA, 15 bp, Homo sapiens
tactgaaatagaaaa

SEQ ID NO: 2113237 - DNA, 15 bp, Homo sapiens
actgaaatagaaaat

SEQ ID NO: 2113238 - DNA, 15 bp, Homo sapiens
ctgaaatagaaaatc

SEQ ID NO: 2113239 - DNA, 15 bp, Homo sapiens
tgaaatagaaaatca

SEQ ID NO: 2113240 - DNA, 15 bp, Homo sapiens
gaaatagaaaatcac

SEQ ID NO: 2113241 - DNA, 15 bp, Homo sapiens
aaatagaaaatcaca

SEQ ID NO: 2113242 - DNA, 15 bp, Homo sapiens
aatagaaaatcacaa

SEQ ID NO: 2113243 - DNA, 15 bp, Homo sapiens
atagaaaatcacaaa

SEQ ID NO: 2113244 - DNA, 15 bp, Homo sapiens
tagaaaatcacaaac

SEQ ID NO: 2113245 - DNA, 15 bp, Homo sapiens
agaaaatcacaaaca

SEQ ID NO: 2113246 - DNA, 15 bp, Homo sapiens
gaaaatcacaaacag

SEQ ID NO: 2113247 - DNA, 15 bp, Homo sapiens
aaaatcacaaacagc

SEQ ID NO: 2113248 - DNA, 15 bp, Homo sapiens
aaatcacaaacagca

SEQ ID NO: 2113249 - DNA, 15 bp, Homo sapiens
aatcacaaacagcaa

SEQ ID NO: 2113250 - DNA, 15 bp, Homo sapiens
atcacaaacagcaag

SEQ ID NO: 2113251 - DNA, 15 bp, Homo sapiens
tcacaaacagcaaga

SEQ ID NO: 2113252 - DNA, 15 bp, Homo sapiens
cacaaacagcaagag

SEQ ID NO: 2113253 - DNA, 15 bp, Homo sapiens
acaaacagcaagaga

SEQ ID NO: 2113254 - DNA, 15 bp, Homo sapiens
caaacagcaagagat

SEQ ID NO: 2113255 - DNA, 15 bp, Homo sapiens
aaacagcaagagatg

SEQ ID NO: 2113256 - DNA, 15 bp, Homo sapiens
aacagcaagagatgc

SEQ ID NO: 2113257 - DNA, 15 bp, Homo sapiens
acagcaagagatgct

SEQ ID NO: 2113258 - DNA, 15 bp, Homo sapiens
cagcaagagatgctg

SEQ ID NO: 2113259 - DNA, 15 bp, Homo sapiens
agcaagagatgctga

SEQ ID NO: 2113260 - DNA, 15 bp, Homo sapiens
gcaagagatgctgag

SEQ ID NO: 2113261 - DNA, 15 bp, Homo sapiens
caagagatgctgagg

SEQ ID NO: 2113262 - DNA, 15 bp, Homo sapiens
aagagatgctgaggc

SEQ ID NO: 2113263 - DNA, 15 bp, Homo sapiens
agagatgctgaggca

SEQ ID NO: 2113264 - DNA, 15 bp, Homo sapiens
gagatgctgaggcac

SEQ ID NO: 2113265 - DNA, 15 bp, Homo sapiens
agatgctgaggcacg

SEQ ID NO: 2113266 - DNA, 15 bp, Homo sapiens
gatgctgaggcacgc

SEQ ID NO: 2113267 - DNA, 15 bp, Homo sapiens
atgctgaggcacgca

SEQ ID NO: 2113268 - DNA, 15 bp, Homo sapiens
tgctgaggcacgcag

SEQ ID NO: 2113269 - DNA, 15 bp, Homo sapiens
gctgaggcacgcagg

SEQ ID NO: 2113270 - DNA, 15 bp, Homo sapiens
ctgaggcacgcaggg

SEQ ID NO: 2113271 - DNA, 15 bp, Homo sapiens
tgaggcacgcagggg

SEQ ID NO: 2113272 - DNA, 15 bp, Homo sapiens
gaggcacgcagggga

SEQ ID NO: 2113273 - DNA, 15 bp, Homo sapiens
aggcacgcaggggag

SEQ ID NO: 2113274 - DNA, 15 bp, Homo sapiens
ggcacgcaggggagg

SEQ ID NO: 2113275 - DNA, 15 bp, Homo sapiens
gcacgcaggggagga

SEQ ID NO: 2113276 - DNA, 15 bp, Homo sapiens
cacgcaggggaggag

SEQ ID NO: 2113277 - DNA, 15 bp, Homo sapiens
acgcaggggaggaga

SEQ ID NO: 2113278 - DNA, 15 bp, Homo sapiens
cgcaggggaggagag

SEQ ID NO: 2113279 - DNA, 15 bp, Homo sapiens
gcaggggaggagaga

SEQ ID NO: 2113280 - DNA, 15 bp, Homo sapiens
caggggaggagagag

SEQ ID NO: 2113281 - DNA, 15 bp, Homo sapiens
aggggaggagagaga

SEQ ID NO: 2113282 - DNA, 15 bp, Homo sapiens
ggggaggagagagag

SEQ ID NO: 2113283 - DNA, 15 bp, Homo sapiens
gggaggagagagaga

SEQ ID NO: 2113284 - DNA, 15 bp, Homo sapiens
ggaggagagagagaa

SEQ ID NO: 2113285 - DNA, 15 bp, Homo sapiens
gaggagagagagaat

SEQ ID NO: 2113286 - DNA, 15 bp, Homo sapiens
aggagagagagaata

SEQ ID NO: 2113287 - DNA, 15 bp, Homo sapiens
ggagagagagaatag

SEQ ID NO: 2113288 - DNA, 15 bp, Homo sapiens
gagagagagaatagc

SEQ ID NO: 2113289 - DNA, 15 bp, Homo sapiens
agagagagaatagcc

SEQ ID NO: 2113290 - DNA, 15 bp, Homo sapiens
gagagagaatagccc

SEQ ID NO: 2113291 - DNA, 15 bp, Homo sapiens
agagagaatagccca

SEQ ID NO: 2113292 - DNA, 15 bp, Homo sapiens
gagagaatagcccaa

SEQ ID NO: 2113293 - DNA, 15 bp, Homo sapiens
agagaatagcccaag

SEQ ID NO: 2113294 - DNA, 15 bp, Homo sapiens
gagaatagcccaaga

SEQ ID NO: 2113295 - DNA, 15 bp, Homo sapiens
agaatagcccaagag

SEQ ID NO: 2113296 - DNA, 15 bp, Homo sapiens
gaatagcccaagaga

SEQ ID NO: 2113297 - DNA, 15 bp, Homo sapiens
aatagcccaagagag

SEQ ID NO: 2113298 - DNA, 15 bp, Homo sapiens
atagcccaagagagg

SEQ ID NO: 2113299 - DNA, 15 bp, Homo sapiens
tagcccaagagaggc

SEQ ID NO: 2113300 - DNA, 15 bp, Homo sapiens
agcccaagagaggca

SEQ ID NO: 2113301 - DNA, 15 bp, Homo sapiens
gcccaagagaggcag

SEQ ID NO: 2113302 - DNA, 15 bp, Homo sapiens
cccaagagaggcaga

SEQ ID NO: 2113303 - DNA, 15 bp, Homo sapiens
ccaagagaggcagaa

SEQ ID NO: 2113304 - DNA, 15 bp, Homo sapiens
caagagaggcagaaa

SEQ ID NO: 2113305 - DNA, 15 bp, Homo sapiens
aagagaggcagaaag

SEQ ID NO: 2113306 - DNA, 15 bp, Homo sapiens
agagaggcagaaagg

SEQ ID NO: 2113307 - DNA, 15 bp, Homo sapiens
gagaggcagaaagga

SEQ ID NO: 2113308 - DNA, 15 bp, Homo sapiens
agaggcagaaaggaa

SEQ ID NO: 2113309 - DNA, 15 bp, Homo sapiens
gaggcagaaaggaaa

SEQ ID NO: 2113310 - DNA, 15 bp, Homo sapiens
aggcagaaaggaaat

SEQ ID NO: 2113311 - DNA, 15 bp, Homo sapiens
ggcagaaaggaaatg

SEQ ID NO: 2113312 - DNA, 15 bp, Homo sapiens
gaaaggaaatgcaga

SEQ ID NO: 2113313 - DNA, 15 bp, Homo sapiens
aaaggaaatgcagaa

SEQ ID NO: 2113314 - DNA, 15 bp, Homo sapiens
aaggaaatgcagaaa

SEQ ID NO: 2113315 - DNA, 15 bp, Homo sapiens
ggaaatgcagaaatg

SEQ ID NO: 2113316 - DNA, 15 bp, Homo sapiens
gaaatgcagaaatga

SEQ ID NO: 2113317 - DNA, 15 bp, Homo sapiens
aaatgcagaaatgag

SEQ ID NO: 2113318 - DNA, 15 bp, Homo sapiens
aatgcagaaatgaga

SEQ ID NO: 2113319 - DNA, 15 bp, Homo sapiens
atgcagaaatgagaa

SEQ ID NO: 2113320 - DNA, 15 bp, Homo sapiens
tgcagaaatgagaaa

SEQ ID NO: 2113321 - DNA, 15 bp, Homo sapiens
gcagaaatgagaaat

SEQ ID NO: 2113322 - DNA, 15 bp, Homo sapiens
cagaaatgagaaatg

SEQ ID NO: 2113323 - DNA, 15 bp, Homo sapiens
agaaatgagaaatgt

SEQ ID NO: 2113324 - DNA, 15 bp, Homo sapiens
gaaatgagaaatgtg

SEQ ID NO: 2113325 - DNA, 15 bp, Homo sapiens
aaatgagaaatgtga

SEQ ID NO: 2113326 - DNA, 15 bp, Homo sapiens
aatgagaaatgtgag

SEQ ID NO: 2113327 - DNA, 15 bp, Homo sapiens
atgagaaatgtgaga

SEQ ID NO: 2113328 - DNA, 15 bp, Homo sapiens
tgagaaatgtgagat

SEQ ID NO: 2113329 - DNA, 15 bp, Homo sapiens
gagaaatgtgagata

SEQ ID NO: 2113330 - DNA, 15 bp, Homo sapiens
agaaatgtgagataa

SEQ ID NO: 2113331 - DNA, 15 bp, Homo sapiens
gaaatgtgagataaa

SEQ ID NO: 2113332 - DNA, 15 bp, Homo sapiens
aaatgtgagataaaa

SEQ ID NO: 2113333 - DNA, 15 bp, Homo sapiens
aatgtgagataaaaa

SEQ ID NO: 2113334 - DNA, 15 bp, Homo sapiens
atgtgagataaaaag

SEQ ID NO: 2113335 - DNA, 15 bp, Homo sapiens
tgtgagataaaaagt

SEQ ID NO: 2113336 - DNA, 15 bp, Homo sapiens
gtgagataaaaagta

SEQ ID NO: 2113337 - DNA, 15 bp, Homo sapiens
tgagataaaaagtag

SEQ ID NO: 2113338 - DNA, 15 bp, Homo sapiens
gagataaaaagtaga

SEQ ID NO: 2113339 - DNA, 15 bp, Homo sapiens
agataaaaagtagaa

SEQ ID NO: 2113340 - DNA, 15 bp, Homo sapiens
gataaaaagtagaaa

SEQ ID NO: 2113341 - DNA, 15 bp, Homo sapiens
ataaaaagtagaaac

SEQ ID NO: 2113342 - DNA, 15 bp, Homo sapiens
taaaaagtagaaaca

SEQ ID NO: 2113343 - DNA, 15 bp, Homo sapiens
aaaaagtagaaacag

SEQ ID NO: 2113344 - DNA, 15 bp, Homo sapiens
aaaagtagaaacagc

SEQ ID NO: 2113345 - DNA, 15 bp, Homo sapiens
aaagtagaaacagca

SEQ ID NO: 2113346 - DNA, 15 bp, Homo sapiens
aagtagaaacagcag

SEQ ID NO: 2113347 - DNA, 15 bp, Homo sapiens
agtagaaacagcaga

SEQ ID NO: 2113348 - DNA, 15 bp, Homo sapiens
gtagaaacagcagaa

SEQ ID NO: 2113349 - DNA, 15 bp, Homo sapiens
tagaaacagcagaaa

SEQ ID NO: 2113350 - DNA, 15 bp, Homo sapiens
agaaacagcagaaag

SEQ ID NO: 2113351 - DNA, 15 bp, Homo sapiens
gaaacagcagaaagg

SEQ ID NO: 2113352 - DNA, 15 bp, Homo sapiens
aaacagcagaaagga

SEQ ID NO: 2113353 - DNA, 15 bp, Homo sapiens
aacagcagaaaggag

SEQ ID NO: 2113354 - DNA, 15 bp, Homo sapiens
acagcagaaaggagg

SEQ ID NO: 2113355 - DNA, 15 bp, Homo sapiens
cagcagaaaggaggc

SEQ ID NO: 2113356 - DNA, 15 bp, Homo sapiens
agcagaaaggaggcc

SEQ ID NO: 2113357 - DNA, 15 bp, Homo sapiens
gcagaaaggaggcca

SEQ ID NO: 2113358 - DNA, 15 bp, Homo sapiens
cagaaaggaggccag

SEQ ID NO: 2113359 - DNA, 15 bp, Homo sapiens
agaaaggaggccaga

SEQ ID NO: 2113360 - DNA, 15 bp, Homo sapiens
gaaaggaggccagac

SEQ ID NO: 2113361 - DNA, 15 bp, Homo sapiens
aaaggaggccagact

SEQ ID NO: 2113362 - DNA, 15 bp, Homo sapiens
aaggaggccagactc

SEQ ID NO: 2113363 - DNA, 15 bp, Homo sapiens
aggaggccagactca

SEQ ID NO: 2113364 - DNA, 15 bp, Homo sapiens
ggaggccagactcag

SEQ ID NO: 2113365 - DNA, 15 bp, Homo sapiens
gaggccagactcaga

SEQ ID NO: 2113366 - DNA, 15 bp, Homo sapiens
aggccagactcagaa

SEQ ID NO: 2113367 - DNA, 15 bp, Homo sapiens
ggccagactcagaaa

SEQ ID NO: 2113368 - DNA, 15 bp, Homo sapiens
gccagactcagaaaa

SEQ ID NO: 2113369 - DNA, 15 bp, Homo sapiens
ccagactcagaaaaa

SEQ ID NO: 2113370 - DNA, 15 bp, Homo sapiens
cagactcagaaaaaa

SEQ ID NO: 2113371 - DNA, 15 bp, Homo sapiens
agactcagaaaaaag

SEQ ID NO: 2113372 - DNA, 15 bp, Homo sapiens
gactcagaaaaaagg

SEQ ID NO: 2113373 - DNA, 15 bp, Homo sapiens
actcagaaaaaaggt

SEQ ID NO: 2113374 - DNA, 15 bp, Homo sapiens
ctcagaaaaaaggtg

SEQ ID NO: 2113375 - DNA, 15 bp, Homo sapiens
tcagaaaaaaggtga

SEQ ID NO: 2113376 - DNA, 15 bp, Homo sapiens
cagaaaaaaggtgaa

SEQ ID NO: 2113377 - DNA, 15 bp, Homo sapiens
agaaaaaaggtgaaa

SEQ ID NO: 2113378 - DNA, 15 bp, Homo sapiens
gaaaaaaggtgaaat

SEQ ID NO: 2113379 - DNA, 15 bp, Homo sapiens
aaaaaaggtgaaatt

SEQ ID NO: 2113380 - DNA, 15 bp, Homo sapiens
aaaaaggtgaaattt

SEQ ID NO: 2113381 - DNA, 15 bp, Homo sapiens
aaaaggtgaaattta

SEQ ID NO: 2113382 - DNA, 15 bp, Homo sapiens
aaaggtgaaatttaa

SEQ ID NO: 2113383 - DNA, 15 bp, Homo sapiens
aaggtgaaatttaaa

SEQ ID NO: 2113384 - DNA, 15 bp, Homo sapiens
aggtgaaatttaaaa

SEQ ID NO: 2113385 - DNA, 15 bp, Homo sapiens
ggtgaaatttaaaac

SEQ ID NO: 2113386 - DNA, 15 bp, Homo sapiens
gtgaaatttaaaacg

SEQ ID NO: 2113387 - DNA, 15 bp, Homo sapiens
tgaaatttaaaacga

SEQ ID NO: 2113388 - DNA, 15 bp, Homo sapiens
gaaatttaaaacgaa

SEQ ID NO: 2113389 - DNA, 15 bp, Homo sapiens
aaatttaaaacgaac

SEQ ID NO: 2113390 - DNA, 15 bp, Homo sapiens
aatttaaaacgaacg

SEQ ID NO: 2113391 - DNA, 15 bp, Homo sapiens
atttaaaacgaacga

SEQ ID NO: 2113392 - DNA, 15 bp, Homo sapiens
tttaaaacgaacgag

SEQ ID NO: 2113393 - DNA, 15 bp, Homo sapiens
ttaaaacgaacgaga

SEQ ID NO: 2113394 - DNA, 15 bp, Homo sapiens
taaaacgaacgagaa

SEQ ID NO: 2113395 - DNA, 15 bp, Homo sapiens
aaaacgaacgagaag

SEQ ID NO: 2113396 - DNA, 15 bp, Homo sapiens
aaacgaacgagaagg

SEQ ID NO: 2113397 - DNA, 15 bp, Homo sapiens
aacgaacgagaaggg

SEQ ID NO: 2113398 - DNA, 15 bp, Homo sapiens
acgaacgagaagggg

SEQ ID NO: 2113399 - DNA, 15 bp, Homo sapiens
cgaacgagaagggga

SEQ ID NO: 2113400 - DNA, 15 bp, Homo sapiens
gaacgagaaggggaa

SEQ ID NO: 2113401 - DNA, 15 bp, Homo sapiens
aacgagaaggggaag

SEQ ID NO: 2113402 - DNA, 15 bp, Homo sapiens
acgagaaggggaagg

SEQ ID NO: 2113403 - DNA, 15 bp, Homo sapiens
cgagaaggggaaggg

SEQ ID NO: 2113404 - DNA, 15 bp, Homo sapiens
gagaaggggaagggg

SEQ ID NO: 2113405 - DNA, 15 bp, Homo sapiens
agaaggggaaggggt

SEQ ID NO: 2113406 - DNA, 15 bp, Homo sapiens
gaaggggaaggggta

SEQ ID NO: 2113407 - DNA, 15 bp, Homo sapiens
aaggggaaggggtaa

SEQ ID NO: 2113408 - DNA, 15 bp, Homo sapiens
aggggaaggggtaac

SEQ ID NO: 2113409 - DNA, 15 bp, Homo sapiens
ggggaaggggtaaca

SEQ ID NO: 2113410 - DNA, 15 bp, Homo sapiens
gggaaggggtaacaa

SEQ ID NO: 2113411 - DNA, 15 bp, Homo sapiens
ggaaggggtaacaaa

SEQ ID NO: 2113412 - DNA, 15 bp, Homo sapiens
gaaggggtaacaaat

SEQ ID NO: 2113413 - DNA, 15 bp, Homo sapiens
aaggggtaacaaata

SEQ ID NO: 2113414 - DNA, 15 bp, Homo sapiens
aggggtaacaaataa

SEQ ID NO: 2113415 - DNA, 15 bp, Homo sapiens
ggggtaacaaataat

SEQ ID NO: 2113416 - DNA, 15 bp, Homo sapiens
gggtaacaaataatc

SEQ ID NO: 2113417 - DNA, 15 bp, Homo sapiens
ggtaacaaataatca

SEQ ID NO: 2113418 - DNA, 15 bp, Homo sapiens
gtaacaaataatcac

SEQ ID NO: 2113419 - DNA, 15 bp, Homo sapiens
taacaaataatcaca

SEQ ID NO: 2113420 - DNA, 15 bp, Homo sapiens
aacaaataatcacag

SEQ ID NO: 2113421 - DNA, 15 bp, Homo sapiens
acaaataatcacagt

SEQ ID NO: 2113422 - DNA, 15 bp, Homo sapiens
caaataatcacagtt

SEQ ID NO: 2113423 - DNA, 15 bp, Homo sapiens
aaataatcacagttc

SEQ ID NO: 2113424 - DNA, 15 bp, Homo sapiens
aataatcacagttca

SEQ ID NO: 2113425 - DNA, 15 bp, Homo sapiens
ataatcacagttcac

SEQ ID NO: 2113426 - DNA, 15 bp, Homo sapiens
taatcacagttcaca

SEQ ID NO: 2113427 - DNA, 15 bp, Homo sapiens
aatcacagttcacaa

SEQ ID NO: 2113428 - DNA, 15 bp, Homo sapiens
atcacagttcacaaa

SEQ ID NO: 2113429 - DNA, 15 bp, Homo sapiens
tcacagttcacaaag

SEQ ID NO: 2113430 - DNA, 15 bp, Homo sapiens
cacagttcacaaaga

SEQ ID NO: 2113431 - DNA, 15 bp, Homo sapiens
acagttcacaaagag

SEQ ID NO: 2113432 - DNA, 15 bp, Homo sapiens
cagttcacaaagaga

SEQ ID NO: 2113433 - DNA, 15 bp, Homo sapiens
agttcacaaagagaa

SEQ ID NO: 2113434 - DNA, 15 bp, Homo sapiens
gttcacaaagagaaa

SEQ ID NO: 2113435 - DNA, 15 bp, Homo sapiens
ttcacaaagagaaaa

SEQ ID NO: 2113436 - DNA, 15 bp, Homo sapiens
tcacaaagagaaaag

SEQ ID NO: 2113437 - DNA, 15 bp, Homo sapiens
cacaaagagaaaaga

SEQ ID NO: 2113438 - DNA, 15 bp, Homo sapiens
acaaagagaaaagag

SEQ ID NO: 2113439 - DNA, 15 bp, Homo sapiens
caaagagaaaagaga

SEQ ID NO: 2113440 - DNA, 15 bp, Homo sapiens
aaagagaaaagagag

SEQ ID NO: 2113441 - DNA, 15 bp, Homo sapiens
aagagaaaagagagg

SEQ ID NO: 2113442 - DNA, 15 bp, Homo sapiens
agagaaaagagaggt

SEQ ID NO: 2113443 - DNA, 15 bp, Homo sapiens
gagaaaagagaggta

SEQ ID NO: 2113444 - DNA, 15 bp, Homo sapiens
agaaaagagaggtag

SEQ ID NO: 2113445 - DNA, 15 bp, Homo sapiens
gaaaagagaggtagg

SEQ ID NO: 2113446 - DNA, 15 bp, Homo sapiens
aaaagagaggtaggc

SEQ ID NO: 2113447 - DNA, 15 bp, Homo sapiens
aaagagaggtaggca

SEQ ID NO: 2113448 - DNA, 15 bp, Homo sapiens
aagagaggtaggcag

SEQ ID NO: 2113449 - DNA, 15 bp, Homo sapiens
agagaggtaggcaga

SEQ ID NO: 2113450 - DNA, 15 bp, Homo sapiens
gagaggtaggcagag

SEQ ID NO: 2113451 - DNA, 15 bp, Homo sapiens
agaggtaggcagaga

SEQ ID NO: 2113452 - DNA, 15 bp, Homo sapiens
gaggtaggcagagaa

SEQ ID NO: 2113453 - DNA, 15 bp, Homo sapiens
aggtaggcagagaaa

SEQ ID NO: 2113454 - DNA, 15 bp, Homo sapiens
ggtaggcagagaaag

SEQ ID NO: 2113455 - DNA, 15 bp, Homo sapiens
gtaggcagagaaagg

SEQ ID NO: 2113456 - DNA, 15 bp, Homo sapiens
taggcagagaaagga

SEQ ID NO: 2113457 - DNA, 15 bp, Homo sapiens
aggcagagaaaggag

SEQ ID NO: 2113458 - DNA, 15 bp, Homo sapiens
ggcagagaaaggaga

SEQ ID NO: 2113459 - DNA, 15 bp, Homo sapiens
gcagagaaaggagag

SEQ ID NO: 2113460 - DNA, 15 bp, Homo sapiens
cagagaaaggagagg

SEQ ID NO: 2113461 - DNA, 15 bp, Homo sapiens
agagaaaggagaggt

SEQ ID NO: 2113462 - DNA, 15 bp, Homo sapiens
gagaaaggagaggta

SEQ ID NO: 2113463 - DNA, 15 bp, Homo sapiens
agaaaggagaggtag

SEQ ID NO: 2113464 - DNA, 15 bp, Homo sapiens
gaaaggagaggtaga

SEQ ID NO: 2113465 - DNA, 15 bp, Homo sapiens
aaaggagaggtagac

SEQ ID NO: 2113466 - DNA, 15 bp, Homo sapiens
aaggagaggtagaca

SEQ ID NO: 2113467 - DNA, 15 bp, Homo sapiens
aggagaggtagacag

SEQ ID NO: 2113468 - DNA, 15 bp, Homo sapiens
ggagaggtagacaga

SEQ ID NO: 2113469 - DNA, 15 bp, Homo sapiens
gagaggtagacagaa

SEQ ID NO: 2113470 - DNA, 15 bp, Homo sapiens
agaggtagacagaac

SEQ ID NO: 2113471 - DNA, 15 bp, Homo sapiens
gaggtagacagaaca

SEQ ID NO: 2113472 - DNA, 15 bp, Homo sapiens
aggtagacagaacaa

SEQ ID NO: 2113473 - DNA, 15 bp, Homo sapiens
ggtagacagaacaag

SEQ ID NO: 2113474 - DNA, 15 bp, Homo sapiens
gtagacagaacaaga

SEQ ID NO: 2113475 - DNA, 15 bp, Homo sapiens
tagacagaacaagaa

SEQ ID NO: 2113476 - DNA, 15 bp, Homo sapiens
agacagaacaagaaa

SEQ ID NO: 2113477 - DNA, 15 bp, Homo sapiens
gacagaacaagaaaa

SEQ ID NO: 2113478 - DNA, 15 bp, Homo sapiens
acagaacaagaaaag

SEQ ID NO: 2113479 - DNA, 15 bp, Homo sapiens
cagaacaagaaaagg

SEQ ID NO: 2113480 - DNA, 15 bp, Homo sapiens
agaacaagaaaagga

SEQ ID NO: 2113481 - DNA, 15 bp, Homo sapiens
gaacaagaaaaggac

SEQ ID NO: 2113482 - DNA, 15 bp, Homo sapiens
aacaagaaaaggaca

SEQ ID NO: 2113483 - DNA, 15 bp, Homo sapiens
acaagaaaaggacaa

SEQ ID NO: 2113484 - DNA, 15 bp, Homo sapiens
caagaaaaggacaaa

SEQ ID NO: 2113485 - DNA, 15 bp, Homo sapiens
aagaaaaggacaaaa

SEQ ID NO: 2113486 - DNA, 15 bp, Homo sapiens
agaaaaggacaaaaa

SEQ ID NO: 2113487 - DNA, 15 bp, Homo sapiens
gaaaaggacaaaaag

SEQ ID NO: 2113488 - DNA, 15 bp, Homo sapiens
aaaaggacaaaaagc

SEQ ID NO: 2113489 - DNA, 15 bp, Homo sapiens
aaaggacaaaaagca

SEQ ID NO: 2113490 - DNA, 15 bp, Homo sapiens
aaggacaaaaagcac

SEQ ID NO: 2113491 - DNA, 15 bp, Homo sapiens
aggacaaaaagcaca

SEQ ID NO: 2113492 - DNA, 15 bp, Homo sapiens
ggacaaaaagcacac

SEQ ID NO: 2113493 - DNA, 15 bp, Homo sapiens
gacaaaaagcacaca

SEQ ID NO: 2113494 - DNA, 15 bp, Homo sapiens
acaaaaagcacacag

SEQ ID NO: 2113495 - DNA, 15 bp, Homo sapiens
caaaaagcacacagc

SEQ ID NO: 2113496 - DNA, 15 bp, Homo sapiens
aaaaagcacacagca

SEQ ID NO: 2113497 - DNA, 15 bp, Homo sapiens
aaaagcacacagcat

SEQ ID NO: 2113498 - DNA, 15 bp, Homo sapiens
aaagcacacagcatg

SEQ ID NO: 2113499 - DNA, 15 bp, Homo sapiens
aagcacacagcatgt

SEQ ID NO: 2113500 - DNA, 15 bp, Homo sapiens
agcacacagcatgtg

SEQ ID NO: 2113501 - DNA, 15 bp, Homo sapiens
gcacacagcatgtga

SEQ ID NO: 2113502 - DNA, 15 bp, Homo sapiens
cacacagcatgtgac

SEQ ID NO: 2113503 - DNA, 15 bp, Homo sapiens
acacagcatgtgacc

SEQ ID NO: 2113504 - DNA, 15 bp, Homo sapiens
cacagcatgtgaccc

SEQ ID NO: 2113505 - DNA, 15 bp, Homo sapiens
acagcatgtgaccca

SEQ ID NO: 2113506 - DNA, 15 bp, Homo sapiens
cagcatgtgacccaa

SEQ ID NO: 2113507 - DNA, 15 bp, Homo sapiens
agcatgtgacccaaa

SEQ ID NO: 2113508 - DNA, 15 bp, Homo sapiens
gcatgtgacccaaaa

SEQ ID NO: 2113509 - DNA, 15 bp, Homo sapiens
catgtgacccaaaaa

SEQ ID NO: 2113510 - DNA, 15 bp, Homo sapiens
atgtgacccaaaaag

SEQ ID NO: 2113511 - DNA, 15 bp, Homo sapiens
tgtgacccaaaaagg

SEQ ID NO: 2113512 - DNA, 15 bp, Homo sapiens
gtgacccaaaaagga

SEQ ID NO: 2113513 - DNA, 15 bp, Homo sapiens
tgacccaaaaaggag

SEQ ID NO: 2113514 - DNA, 15 bp, Homo sapiens
gacccaaaaaggaga

SEQ ID NO: 2113515 - DNA, 15 bp, Homo sapiens
acccaaaaaggagac

SEQ ID NO: 2113516 - DNA, 15 bp, Homo sapiens
cccaaaaaggagaca

SEQ ID NO: 2113517 - DNA, 15 bp, Homo sapiens
ccaaaaaggagacat

SEQ ID NO: 2113518 - DNA, 15 bp, Homo sapiens
caaaaaggagacatg

SEQ ID NO: 2113519 - DNA, 15 bp, Homo sapiens
aaaaaggagacatga

SEQ ID NO: 2113520 - DNA, 15 bp, Homo sapiens
aaaaggagacatgaa

SEQ ID NO: 2113521 - DNA, 15 bp, Homo sapiens
aaaggagacatgaaa

SEQ ID NO: 2113522 - DNA, 15 bp, Homo sapiens
aaggagacatgaaat

SEQ ID NO: 2113523 - DNA, 15 bp, Homo sapiens
aggagacatgaaata

SEQ ID NO: 2113524 - DNA, 15 bp, Homo sapiens
ggagacatgaaataa

SEQ ID NO: 2113525 - DNA, 15 bp, Homo sapiens
gagacatgaaataaa

SEQ ID NO: 2113526 - DNA, 15 bp, Homo sapiens
agacatgaaataaag

SEQ ID NO: 2113527 - DNA, 15 bp, Homo sapiens
gacatgaaataaagc

SEQ ID NO: 2113528 - DNA, 15 bp, Homo sapiens
acatgaaataaagcg

SEQ ID NO: 2113529 - DNA, 15 bp, Homo sapiens
catgaaataaagcgt

SEQ ID NO: 2113530 - DNA, 15 bp, Homo sapiens
atgaaataaagcgtg

SEQ ID NO: 2113531 - DNA, 15 bp, Homo sapiens
tgaaataaagcgtga

SEQ ID NO: 2113532 - DNA, 15 bp, Homo sapiens
gaaataaagcgtgaa

SEQ ID NO: 2113533 - DNA, 15 bp, Homo sapiens
aaataaagcgtgaaa

SEQ ID NO: 2113534 - DNA, 15 bp, Homo sapiens
aataaagcgtgaaag

SEQ ID NO: 2113535 - DNA, 15 bp, Homo sapiens
ataaagcgtgaaaga

SEQ ID NO: 2113536 - DNA, 15 bp, Homo sapiens
taaagcgtgaaagaa

SEQ ID NO: 2113537 - DNA, 15 bp, Homo sapiens
aaagcgtgaaagaag

SEQ ID NO: 2113538 - DNA, 15 bp, Homo sapiens
aagcgtgaaagaaga

SEQ ID NO: 2113539 - DNA, 15 bp, Homo sapiens
agcgtgaaagaagag

SEQ ID NO: 2113540 - DNA, 15 bp, Homo sapiens
gcgtgaaagaagagc

SEQ ID NO: 2113541 - DNA, 15 bp, Homo sapiens
cgtgaaagaagagcc

SEQ ID NO: 2113542 - DNA, 15 bp, Homo sapiens
gtgaaagaagagcca

SEQ ID NO: 2113543 - DNA, 15 bp, Homo sapiens
tgaaagaagagccac

SEQ ID NO: 2113544 - DNA, 15 bp, Homo sapiens
gaaagaagagccaca

SEQ ID NO: 2113545 - DNA, 15 bp, Homo sapiens
aaagaagagccacat

SEQ ID NO: 2113546 - DNA, 15 bp, Homo sapiens
aagaagagccacatc

SEQ ID NO: 2113547 - DNA, 15 bp, Homo sapiens
agaagagccacatct

SEQ ID NO: 2113548 - DNA, 15 bp, Homo sapiens
gaagagccacatcta

SEQ ID NO: 2113549 - DNA, 15 bp, Homo sapiens
aagagccacatctag

SEQ ID NO: 2113550 - DNA, 15 bp, Homo sapiens
agagccacatctagg

SEQ ID NO: 2113551 - DNA, 15 bp, Homo sapiens
gagccacatctagga

SEQ ID NO: 2113552 - DNA, 15 bp, Homo sapiens
agccacatctaggag

SEQ ID NO: 2113553 - DNA, 15 bp, Homo sapiens
gccacatctaggaga

SEQ ID NO: 2113554 - DNA, 15 bp, Homo sapiens
ccacatctaggagag

SEQ ID NO: 2113555 - DNA, 15 bp, Homo sapiens
cacatctaggagagc

SEQ ID NO: 2113556 - DNA, 15 bp, Homo sapiens
acatctaggagagca

SEQ ID NO: 2113557 - DNA, 15 bp, Homo sapiens
catctaggagagcaa

SEQ ID NO: 2113558 - DNA, 15 bp, Homo sapiens
atctaggagagcaaa

SEQ ID NO: 2113559 - DNA, 15 bp, Homo sapiens
tctaggagagcaaag

SEQ ID NO: 2113560 - DNA, 15 bp, Homo sapiens
ctaggagagcaaaga

SEQ ID NO: 2113561 - DNA, 15 bp, Homo sapiens
taggagagcaaagag

SEQ ID NO: 2113562 - DNA, 15 bp, Homo sapiens
aggagagcaaagaga

SEQ ID NO: 2113563 - DNA, 15 bp, Homo sapiens
ggagagcaaagagaa

SEQ ID NO: 2113564 - DNA, 15 bp, Homo sapiens
gagagcaaagagaaa

SEQ ID NO: 2113565 - DNA, 15 bp, Homo sapiens
agagcaaagagaaat

SEQ ID NO: 2113566 - DNA, 15 bp, Homo sapiens
gagcaaagagaaata

SEQ ID NO: 2113567 - DNA, 15 bp, Homo sapiens
agcaaagagaaatag

SEQ ID NO: 2113568 - DNA, 15 bp, Homo sapiens
gcaaagagaaatagc

SEQ ID NO: 2113569 - DNA, 15 bp, Homo sapiens
caaagagaaatagca

SEQ ID NO: 2113570 - DNA, 15 bp, Homo sapiens
aaagagaaatagcaa

SEQ ID NO: 2113571 - DNA, 15 bp, Homo sapiens
aagagaaatagcaac

SEQ ID NO: 2113572 - DNA, 15 bp, Homo sapiens
agagaaatagcaaca

SEQ ID NO: 2113573 - DNA, 15 bp, Homo sapiens
gagaaatagcaacaa

SEQ ID NO: 2113574 - DNA, 15 bp, Homo sapiens
agaaatagcaacaaa

SEQ ID NO: 2113575 - DNA, 15 bp, Homo sapiens
gaaatagcaacaaaa

SEQ ID NO: 2113576 - DNA, 15 bp, Homo sapiens
aaatagcaacaaaat

SEQ ID NO: 2113577 - DNA, 15 bp, Homo sapiens
aatagcaacaaaatg

SEQ ID NO: 2113578 - DNA, 15 bp, Homo sapiens
atagcaacaaaatga

SEQ ID NO: 2113579 - DNA, 15 bp, Homo sapiens
tagcaacaaaatgaa

SEQ ID NO: 2113580 - DNA, 15 bp, Homo sapiens
agcaacaaaatgaaa

SEQ ID NO: 2113581 - DNA, 15 bp, Homo sapiens
gcaacaaaatgaaaa

SEQ ID NO: 2113582 - DNA, 15 bp, Homo sapiens
caacaaaatgaaaaa

SEQ ID NO: 2113583 - DNA, 15 bp, Homo sapiens
aacaaaatgaaaaat

SEQ ID NO: 2113584 - DNA, 15 bp, Homo sapiens
acaaaatgaaaaatg

SEQ ID NO: 2113585 - DNA, 15 bp, Homo sapiens
caaaatgaaaaatga

SEQ ID NO: 2113586 - DNA, 15 bp, Homo sapiens
aaaatgaaaaatgag

SEQ ID NO: 2113587 - DNA, 15 bp, Homo sapiens
aaatgaaaaatgaga

SEQ ID NO: 2113588 - DNA, 15 bp, Homo sapiens
aatgaaaaatgagag

SEQ ID NO: 2113589 - DNA, 15 bp, Homo sapiens
atgaaaaatgagaga

SEQ ID NO: 2113590 - DNA, 15 bp, Homo sapiens
tgaaaaatgagagat

SEQ ID NO: 2113591 - DNA, 15 bp, Homo sapiens
gaaaaatgagagata

SEQ ID NO: 2113592 - DNA, 15 bp, Homo sapiens
aaaaatgagagatat

SEQ ID NO: 2113593 - DNA, 15 bp, Homo sapiens
aaaatgagagatatg

SEQ ID NO: 2113594 - DNA, 15 bp, Homo sapiens
aaatgagagatatgt

SEQ ID NO: 2113595 - DNA, 15 bp, Homo sapiens
aatgagagatatgtc

SEQ ID NO: 2113596 - DNA, 15 bp, Homo sapiens
atgagagatatgtct

SEQ ID NO: 2113597 - DNA, 15 bp, Homo sapiens
tgagagatatgtcta

SEQ ID NO: 2113598 - DNA, 15 bp, Homo sapiens
gagagatatgtctaa

SEQ ID NO: 2113599 - DNA, 15 bp, Homo sapiens
agagatatgtctaag

SEQ ID NO: 2113600 - DNA, 15 bp, Homo sapiens
gagatatgtctaaga

SEQ ID NO: 2113601 - DNA, 15 bp, Homo sapiens
agatatgtctaagac

SEQ ID NO: 2113602 - DNA, 15 bp, Homo sapiens
gatatgtctaagaca

SEQ ID NO: 2113603 - DNA, 15 bp, Homo sapiens
atatgtctaagacaa

SEQ ID NO: 2113604 - DNA, 15 bp, Homo sapiens
tatgtctaagacaag

SEQ ID NO: 2113605 - DNA, 15 bp, Homo sapiens
atgtctaagacaaga

SEQ ID NO: 2113606 - DNA, 15 bp, Homo sapiens
tgtctaagacaagac

SEQ ID NO: 2113607 - DNA, 15 bp, Homo sapiens
gtctaagacaagaca

SEQ ID NO: 2113608 - DNA, 15 bp, Homo sapiens
tctaagacaagacac

SEQ ID NO: 2113609 - DNA, 15 bp, Homo sapiens
ctaagacaagacaca

SEQ ID NO: 2113610 - DNA, 15 bp, Homo sapiens
taagacaagacacag

SEQ ID NO: 2113611 - DNA, 15 bp, Homo sapiens
aagacaagacacaga

SEQ ID NO: 2113612 - DNA, 15 bp, Homo sapiens
agacaagacacagac

SEQ ID NO: 2113613 - DNA, 15 bp, Homo sapiens
gacaagacacagacc

SEQ ID NO: 2113614 - DNA, 15 bp, Homo sapiens
acaagacacagacca

SEQ ID NO: 2113615 - DNA, 15 bp, Homo sapiens
caagacacagaccac

SEQ ID NO: 2113616 - DNA, 15 bp, Homo sapiens
aagacacagaccact

SEQ ID NO: 2113617 - DNA, 15 bp, Homo sapiens
agacacagaccactc

SEQ ID NO: 2113618 - DNA, 15 bp, Homo sapiens
gacacagaccactct

SEQ ID NO: 2113619 - DNA, 15 bp, Homo sapiens
acacagaccactctt

SEQ ID NO: 2113620 - DNA, 15 bp, Homo sapiens
cacagaccactcttg

SEQ ID NO: 2113621 - DNA, 15 bp, Homo sapiens
acagaccactcttgt

SEQ ID NO: 2113622 - DNA, 15 bp, Homo sapiens
cagaccactcttgtg

SEQ ID NO: 2113623 - DNA, 15 bp, Homo sapiens
agaccactcttgtga

SEQ ID NO: 2113624 - DNA, 15 bp, Homo sapiens
gaccactcttgtgaa

SEQ ID NO: 2113625 - DNA, 15 bp, Homo sapiens
accactcttgtgaac

SEQ ID NO: 2113626 - DNA, 15 bp, Homo sapiens
ccactcttgtgaaca

SEQ ID NO: 2113627 - DNA, 15 bp, Homo sapiens
cactcttgtgaacaa

SEQ ID NO: 2113628 - DNA, 15 bp, Homo sapiens
actcttgtgaacaaa

SEQ ID NO: 2113629 - DNA, 15 bp, Homo sapiens
ctcttgtgaacaaaa

SEQ ID NO: 2113630 - DNA, 15 bp, Homo sapiens
tcttgtgaacaaaaa

SEQ ID NO: 2113631 - DNA, 15 bp, Homo sapiens
cttgtgaacaaaaag

SEQ ID NO: 2113632 - DNA, 15 bp, Homo sapiens
ttgtgaacaaaaaga

SEQ ID NO: 2113633 - DNA, 15 bp, Homo sapiens
tgtgaacaaaaagag

SEQ ID NO: 2113634 - DNA, 15 bp, Homo sapiens
gtgaacaaaaagaga

SEQ ID NO: 2113635 - DNA, 15 bp, Homo sapiens
tgaacaaaaagagaa

SEQ ID NO: 2113636 - DNA, 15 bp, Homo sapiens
gaacaaaaagagaaa

SEQ ID NO: 2113637 - DNA, 15 bp, Homo sapiens
aacaaaaagagaaaa

SEQ ID NO: 2113638 - DNA, 15 bp, Homo sapiens
acaaaaagagaaaat

SEQ ID NO: 2113639 - DNA, 15 bp, Homo sapiens
caaaaagagaaaatg

SEQ ID NO: 2113640 - DNA, 15 bp, Homo sapiens
aaaaagagaaaatga

SEQ ID NO: 2113641 - DNA, 15 bp, Homo sapiens
aaaagagaaaatgag

SEQ ID NO: 2113642 - DNA, 15 bp, Homo sapiens
aaagagaaaatgagg

SEQ ID NO: 2113643 - DNA, 15 bp, Homo sapiens
aagagaaaatgaggc

SEQ ID NO: 2113644 - DNA, 15 bp, Homo sapiens
agagaaaatgaggca

SEQ ID NO: 2113645 - DNA, 15 bp, Homo sapiens
gagaaaatgaggcaa

SEQ ID NO: 2113646 - DNA, 15 bp, Homo sapiens
agaaaatgaggcaaa

SEQ ID NO: 2113647 - DNA, 15 bp, Homo sapiens
gaaaatgaggcaaag

SEQ ID NO: 2113648 - DNA, 15 bp, Homo sapiens
aaaatgaggcaaagg

SEQ ID NO: 2113649 - DNA, 15 bp, Homo sapiens
aaatgaggcaaaggc

SEQ ID NO: 2113650 - DNA, 15 bp, Homo sapiens
aatgaggcaaaggca

SEQ ID NO: 2113651 - DNA, 15 bp, Homo sapiens
atgaggcaaaggcac

SEQ ID NO: 2113652 - DNA, 15 bp, Homo sapiens
tgaggcaaaggcaca

SEQ ID NO: 2113653 - DNA, 15 bp, Homo sapiens
gaggcaaaggcacac

SEQ ID NO: 2113654 - DNA, 15 bp, Homo sapiens
aggcaaaggcacaca

SEQ ID NO: 2113655 - DNA, 15 bp, Homo sapiens
ggcaaaggcacacac

SEQ ID NO: 2113656 - DNA, 15 bp, Homo sapiens
gcaaaggcacacacg

SEQ ID NO: 2113657 - DNA, 15 bp, Homo sapiens
caaaggcacacacga

SEQ ID NO: 2113658 - DNA, 15 bp, Homo sapiens
aaaggcacacacgaa

SEQ ID NO: 2113659 - DNA, 15 bp, Homo sapiens
aaggcacacacgaaa

SEQ ID NO: 2113660 - DNA, 15 bp, Homo sapiens
aggcacacacgaaag

SEQ ID NO: 2113661 - DNA, 15 bp, Homo sapiens
ggcacacacgaaaga

SEQ ID NO: 2113662 - DNA, 15 bp, Homo sapiens
gcacacacgaaagaa

SEQ ID NO: 2113663 - DNA, 15 bp, Homo sapiens
cacacacgaaagaaa

SEQ ID NO: 2113664 - DNA, 15 bp, Homo sapiens
acacacgaaagaaat

SEQ ID NO: 2113665 - DNA, 15 bp, Homo sapiens
cacacgaaagaaatt

SEQ ID NO: 2113666 - DNA, 15 bp, Homo sapiens
acacgaaagaaatta

SEQ ID NO: 2113667 - DNA, 15 bp, Homo sapiens
cacgaaagaaattag

SEQ ID NO: 2113668 - DNA, 15 bp, Homo sapiens
acgaaagaaattagc

SEQ ID NO: 2113669 - DNA, 15 bp, Homo sapiens
cgaaagaaattagca

SEQ ID NO: 2113670 - DNA, 15 bp, Homo sapiens
gaaagaaattagcaa

SEQ ID NO: 2113671 - DNA, 15 bp, Homo sapiens
aaagaaattagcaag

SEQ ID NO: 2113672 - DNA, 15 bp, Homo sapiens
aagaaattagcaaga

SEQ ID NO: 2113673 - DNA, 15 bp, Homo sapiens
agaaattagcaagag

SEQ ID NO: 2113674 - DNA, 15 bp, Homo sapiens
gaaattagcaagaga

SEQ ID NO: 2113675 - DNA, 15 bp, Homo sapiens
aaattagcaagagaa

SEQ ID NO: 2113676 - DNA, 15 bp, Homo sapiens
aattagcaagagaaa

SEQ ID NO: 2113677 - DNA, 15 bp, Homo sapiens
attagcaagagaaac

SEQ ID NO: 2113678 - DNA, 15 bp, Homo sapiens
ttagcaagagaaaca

SEQ ID NO: 2113679 - DNA, 15 bp, Homo sapiens
tagcaagagaaacat

SEQ ID NO: 2113680 - DNA, 15 bp, Homo sapiens
gcaagagaaacatgg

SEQ ID NO: 2113681 - DNA, 15 bp, Homo sapiens
caagagaaacatgga

SEQ ID NO: 2113682 - DNA, 15 bp, Homo sapiens
aagagaaacatggaa

SEQ ID NO: 2113683 - DNA, 15 bp, Homo sapiens
agagaaacatggaaa

SEQ ID NO: 2113684 - DNA, 15 bp, Homo sapiens
gagaaacatggaaat

SEQ ID NO: 2113685 - DNA, 15 bp, Homo sapiens
agaaacatggaaatg

SEQ ID NO: 2113686 - DNA, 15 bp, Homo sapiens
gaaacatggaaatgg

SEQ ID NO: 2113687 - DNA, 15 bp, Homo sapiens
aaacatggaaatggg

SEQ ID NO: 2113688 - DNA, 15 bp, Homo sapiens
aacatggaaatgggt

SEQ ID NO: 2113689 - DNA, 15 bp, Homo sapiens
acatggaaatgggta

SEQ ID NO: 2113690 - DNA, 15 bp, Homo sapiens
catggaaatgggtaa

SEQ ID NO: 2113691 - DNA, 15 bp, Homo sapiens
atggaaatgggtaag

SEQ ID NO: 2113692 - DNA, 15 bp, Homo sapiens
tggaaatgggtaaga

SEQ ID NO: 2113693 - DNA, 15 bp, Homo sapiens
ggaaatgggtaagac

SEQ ID NO: 2113694 - DNA, 15 bp, Homo sapiens
gaaatgggtaagaca

SEQ ID NO: 2113695 - DNA, 15 bp, Homo sapiens
aaatgggtaagacac

SEQ ID NO: 2113696 - DNA, 15 bp, Homo sapiens
aatgggtaagacaca

SEQ ID NO: 2113697 - DNA, 15 bp, Homo sapiens
atgggtaagacacac

SEQ ID NO: 2113698 - DNA, 15 bp, Homo sapiens
tgggtaagacacact

SEQ ID NO: 2113699 - DNA, 15 bp, Homo sapiens
gggtaagacacactt

SEQ ID NO: 2113700 - DNA, 15 bp, Homo sapiens
ggtaagacacacttt

SEQ ID NO: 2113701 - DNA, 15 bp, Homo sapiens
gtaagacacacttta

SEQ ID NO: 2113702 - DNA, 15 bp, Homo sapiens
taagacacactttag

SEQ ID NO: 2113703 - DNA, 15 bp, Homo sapiens
aagacacactttaga

SEQ ID NO: 2113704 - DNA, 15 bp, Homo sapiens
agacacactttagat

SEQ ID NO: 2113705 - DNA, 15 bp, Homo sapiens
gacacactttagata

SEQ ID NO: 2113706 - DNA, 15 bp, Homo sapiens
acacactttagatag

SEQ ID NO: 2113707 - DNA, 15 bp, Homo sapiens
cacactttagataga

SEQ ID NO: 2113708 - DNA, 15 bp, Homo sapiens
acactttagatagag

SEQ ID NO: 2113709 - DNA, 15 bp, Homo sapiens
cactttagatagaga

SEQ ID NO: 2113710 - DNA, 15 bp, Homo sapiens
actttagatagagaa

SEQ ID NO: 2113711 - DNA, 15 bp, Homo sapiens
ctttagatagagaac

SEQ ID NO: 2113712 - DNA, 15 bp, Homo sapiens
tttagatagagaaca

SEQ ID NO: 2113713 - DNA, 15 bp, Homo sapiens
ttagatagagaacaa

SEQ ID NO: 2113714 - DNA, 15 bp, Homo sapiens
tagatagagaacaaa

SEQ ID NO: 2113715 - DNA, 15 bp, Homo sapiens
agatagagaacaaag

SEQ ID NO: 2113716 - DNA, 15 bp, Homo sapiens
gatagagaacaaaga

SEQ ID NO: 2113717 - DNA, 15 bp, Homo sapiens
atagagaacaaagag

SEQ ID NO: 2113718 - DNA, 15 bp, Homo sapiens
tagagaacaaagagc

SEQ ID NO: 2113719 - DNA, 15 bp, Homo sapiens
agagaacaaagagca

SEQ ID NO: 2113720 - DNA, 15 bp, Homo sapiens
gagaacaaagagcaa

SEQ ID NO: 2113721 - DNA, 15 bp, Homo sapiens
agaacaaagagcaaa

SEQ ID NO: 2113722 - DNA, 15 bp, Homo sapiens
gaacaaagagcaaag

SEQ ID NO: 2113723 - DNA, 15 bp, Homo sapiens
aacaaagagcaaaga

SEQ ID NO: 2113724 - DNA, 15 bp, Homo sapiens
acaaagagcaaagac

SEQ ID NO: 2113725 - DNA, 15 bp, Homo sapiens
caaagagcaaagaca

SEQ ID NO: 2113726 - DNA, 15 bp, Homo sapiens
aaagagcaaagacaa

SEQ ID NO: 2113727 - DNA, 15 bp, Homo sapiens
aagagcaaagacaag

SEQ ID NO: 2113728 - DNA, 15 bp, Homo sapiens
agagcaaagacaaga

SEQ ID NO: 2113729 - DNA, 15 bp, Homo sapiens
gagcaaagacaagaa

SEQ ID NO: 2113730 - DNA, 15 bp, Homo sapiens
agcaaagacaagaaa

SEQ ID NO: 2113731 - DNA, 15 bp, Homo sapiens
gcaaagacaagaaag

SEQ ID NO: 2113732 - DNA, 15 bp, Homo sapiens
caaagacaagaaaga

SEQ ID NO: 2113733 - DNA, 15 bp, Homo sapiens
aaagacaagaaagaa

SEQ ID NO: 2113734 - DNA, 15 bp, Homo sapiens
aagacaagaaagaaa

SEQ ID NO: 2113735 - DNA, 15 bp, Homo sapiens
agacaagaaagaaag

SEQ ID NO: 2113736 - DNA, 15 bp, Homo sapiens
gacaagaaagaaaga

SEQ ID NO: 2113737 - DNA, 15 bp, Homo sapiens
acaagaaagaaagag

SEQ ID NO: 2113738 - DNA, 15 bp, Homo sapiens
caagaaagaaagaga

SEQ ID NO: 2113739 - DNA, 15 bp, Homo sapiens
aagaaagaaagagac

SEQ ID NO: 2113740 - DNA, 15 bp, Homo sapiens
agaaagaaagagaca

SEQ ID NO: 2113741 - DNA, 15 bp, Homo sapiens
gaaagaaagagacaa

SEQ ID NO: 2113742 - DNA, 15 bp, Homo sapiens
aaagaaagagacaaa

SEQ ID NO: 2113743 - DNA, 15 bp, Homo sapiens
aagaaagagacaaag

SEQ ID NO: 2113744 - DNA, 15 bp, Homo sapiens
agaaagagacaaaga

SEQ ID NO: 2113745 - DNA, 15 bp, Homo sapiens
gaaagagacaaagaa

SEQ ID NO: 2113746 - DNA, 15 bp, Homo sapiens
aaagagacaaagaaa

SEQ ID NO: 2113747 - DNA, 15 bp, Homo sapiens
aagagacaaagaaat

SEQ ID NO: 2113748 - DNA, 15 bp, Homo sapiens
agagacaaagaaata

SEQ ID NO: 2113749 - DNA, 15 bp, Homo sapiens
gagacaaagaaatac

SEQ ID NO: 2113750 - DNA, 15 bp, Homo sapiens
agacaaagaaataca

SEQ ID NO: 2113751 - DNA, 15 bp, Homo sapiens
gacaaagaaatacac

SEQ ID NO: 2113752 - DNA, 15 bp, Homo sapiens
acaaagaaatacaca

SEQ ID NO: 2113753 - DNA, 15 bp, Homo sapiens
caaagaaatacacac

SEQ ID NO: 2113754 - DNA, 15 bp, Homo sapiens
aaagaaatacacact

SEQ ID NO: 2113755 - DNA, 15 bp, Homo sapiens
aagaaatacacactt

SEQ ID NO: 2113756 - DNA, 15 bp, Homo sapiens
agaaatacacacttg

SEQ ID NO: 2113757 - DNA, 15 bp, Homo sapiens
gaaatacacacttga

SEQ ID NO: 2113758 - DNA, 15 bp, Homo sapiens
aaatacacacttgag

SEQ ID NO: 2113759 - DNA, 15 bp, Homo sapiens
aatacacacttgagt

SEQ ID NO: 2113760 - DNA, 15 bp, Homo sapiens
atacacacttgagtg

SEQ ID NO: 2113761 - DNA, 15 bp, Homo sapiens
tacacacttgagtgc

SEQ ID NO: 2113762 - DNA, 15 bp, Homo sapiens
acacacttgagtgca

SEQ ID NO: 2113763 - DNA, 15 bp, Homo sapiens
cacacttgagtgcaa

SEQ ID NO: 2113764 - DNA, 15 bp, Homo sapiens
acacttgagtgcaag

SEQ ID NO: 2113765 - DNA, 15 bp, Homo sapiens
cacttgagtgcaaga

SEQ ID NO: 2113766 - DNA, 15 bp, Homo sapiens
acttgagtgcaagag

SEQ ID NO: 2113767 - DNA, 15 bp, Homo sapiens
cttgagtgcaagaga

SEQ ID NO: 2113768 - DNA, 15 bp, Homo sapiens
ttgagtgcaagagat

SEQ ID NO: 2113769 - DNA, 15 bp, Homo sapiens
tgagtgcaagagata

SEQ ID NO: 2113770 - DNA, 15 bp, Homo sapiens
gagtgcaagagataa

SEQ ID NO: 2113771 - DNA, 15 bp, Homo sapiens
agtgcaagagataag

SEQ ID NO: 2113772 - DNA, 15 bp, Homo sapiens
gtgcaagagataagc

SEQ ID NO: 2113773 - DNA, 15 bp, Homo sapiens
tgcaagagataagca

SEQ ID NO: 2113774 - DNA, 15 bp, Homo sapiens
gcaagagataagcaa

SEQ ID NO: 2113775 - DNA, 15 bp, Homo sapiens
caagagataagcaaa

SEQ ID NO: 2113776 - DNA, 15 bp, Homo sapiens
aagagataagcaaag

SEQ ID NO: 2113777 - DNA, 15 bp, Homo sapiens
agagataagcaaagg

SEQ ID NO: 2113778 - DNA, 15 bp, Homo sapiens
gagataagcaaaggc

SEQ ID NO: 2113779 - DNA, 15 bp, Homo sapiens
agataagcaaaggca

SEQ ID NO: 2113780 - DNA, 15 bp, Homo sapiens
gataagcaaaggcag

SEQ ID NO: 2113781 - DNA, 15 bp, Homo sapiens
ataagcaaaggcaga

SEQ ID NO: 2113782 - DNA, 15 bp, Homo sapiens
taagcaaaggcagac

SEQ ID NO: 2113783 - DNA, 15 bp, Homo sapiens
aagcaaaggcagaca

SEQ ID NO: 2113784 - DNA, 15 bp, Homo sapiens
agcaaaggcagacat

SEQ ID NO: 2113785 - DNA, 15 bp, Homo sapiens
gcaaaggcagacatt

SEQ ID NO: 2113786 - DNA, 15 bp, Homo sapiens
caaaggcagacattc

SEQ ID NO: 2113787 - DNA, 15 bp, Homo sapiens
aaaggcagacattca

SEQ ID NO: 2113788 - DNA, 15 bp, Homo sapiens
aaggcagacattcag

SEQ ID NO: 2113789 - DNA, 15 bp, Homo sapiens
aggcagacattcaga

SEQ ID NO: 2113790 - DNA, 15 bp, Homo sapiens
ggcagacattcagag

SEQ ID NO: 2113791 - DNA, 15 bp, Homo sapiens
gcagacattcagagg

SEQ ID NO: 2113792 - DNA, 15 bp, Homo sapiens
cagacattcagagga

SEQ ID NO: 2113793 - DNA, 15 bp, Homo sapiens
agacattcagaggaa

SEQ ID NO: 2113794 - DNA, 15 bp, Homo sapiens
gacattcagaggaag

SEQ ID NO: 2113795 - DNA, 15 bp, Homo sapiens
acattcagaggaagt

SEQ ID NO: 2113796 - DNA, 15 bp, Homo sapiens
cattcagaggaagta

SEQ ID NO: 2113797 - DNA, 15 bp, Homo sapiens
attcagaggaagtaa

SEQ ID NO: 2113798 - DNA, 15 bp, Homo sapiens
ttcagaggaagtaag

SEQ ID NO: 2113799 - DNA, 15 bp, Homo sapiens
tcagaggaagtaagt

SEQ ID NO: 2113800 - DNA, 15 bp, Homo sapiens
cagaggaagtaagta

SEQ ID NO: 2113801 - DNA, 15 bp, Homo sapiens
agaggaagtaagtag

SEQ ID NO: 2113802 - DNA, 15 bp, Homo sapiens
gaggaagtaagtagt

SEQ ID NO: 2113803 - DNA, 15 bp, Homo sapiens
aggaagtaagtagta

SEQ ID NO: 2113804 - DNA, 15 bp, Homo sapiens
ggaagtaagtagtag

SEQ ID NO: 2113805 - DNA, 15 bp, Homo sapiens
gaagtaagtagtaga

SEQ ID NO: 2113806 - DNA, 15 bp, Homo sapiens
aagtaagtagtagaa

SEQ ID NO: 2113807 - DNA, 15 bp, Homo sapiens
agtaagtagtagaag

SEQ ID NO: 2113808 - DNA, 15 bp, Homo sapiens
gtaagtagtagaaga

SEQ ID NO: 2113809 - DNA, 15 bp, Homo sapiens
taagtagtagaagag

SEQ ID NO: 2113810 - DNA, 15 bp, Homo sapiens
aagtagtagaagagg

SEQ ID NO: 2113811 - DNA, 15 bp, Homo sapiens
agtagtagaagaggc

SEQ ID NO: 2113812 - DNA, 15 bp, Homo sapiens
gtagtagaagaggca

SEQ ID NO: 2113813 - DNA, 15 bp, Homo sapiens
tagtagaagaggcaa

SEQ ID NO: 2113814 - DNA, 15 bp, Homo sapiens
agtagaagaggcaag

SEQ ID NO: 2113815 - DNA, 15 bp, Homo sapiens
gtagaagaggcaaga

SEQ ID NO: 2113816 - DNA, 15 bp, Homo sapiens
tagaagaggcaagat

SEQ ID NO: 2113817 - DNA, 15 bp, Homo sapiens
agaagaggcaagata

SEQ ID NO: 2113818 - DNA, 15 bp, Homo sapiens
gaagaggcaagatac

SEQ ID NO: 2113819 - DNA, 15 bp, Homo sapiens
aagaggcaagataca

SEQ ID NO: 2113820 - DNA, 15 bp, Homo sapiens
agaggcaagatacag

SEQ ID NO: 2113821 - DNA, 15 bp, Homo sapiens
gaggcaagatacagt

SEQ ID NO: 2113822 - DNA, 15 bp, Homo sapiens
aggcaagatacagtg

SEQ ID NO: 2113823 - DNA, 15 bp, Homo sapiens
ggcaagatacagtga

SEQ ID NO: 2113824 - DNA, 15 bp, Homo sapiens
gcaagatacagtgag

SEQ ID NO: 2113825 - DNA, 15 bp, Homo sapiens
caagatacagtgagg

SEQ ID NO: 2113826 - DNA, 15 bp, Homo sapiens
aagatacagtgaggg

SEQ ID NO: 2113827 - DNA, 15 bp, Homo sapiens
agatacagtgagggg

SEQ ID NO: 2113828 - DNA, 15 bp, Homo sapiens
gatacagtgaggggc

SEQ ID NO: 2113829 - DNA, 15 bp, Homo sapiens
tacagtgaggggcac

SEQ ID NO: 2113830 - DNA, 15 bp, Homo sapiens
acagtgaggggcaca

SEQ ID NO: 2113831 - DNA, 15 bp, Homo sapiens
cagtgaggggcacaa

SEQ ID NO: 2113832 - DNA, 15 bp, Homo sapiens
agtgaggggcacaag

SEQ ID NO: 2113833 - DNA, 15 bp, Homo sapiens
gtgaggggcacaaga

SEQ ID NO: 2113834 - DNA, 15 bp, Homo sapiens
tgaggggcacaagag

SEQ ID NO: 2113835 - DNA, 15 bp, Homo sapiens
gaggggcacaagagg

SEQ ID NO: 2113836 - DNA, 15 bp, Homo sapiens
aggggcacaagaggc

SEQ ID NO: 2113837 - DNA, 15 bp, Homo sapiens
ggggcacaagaggca

SEQ ID NO: 2113838 - DNA, 15 bp, Homo sapiens
gggcacaagaggcat

SEQ ID NO: 2113839 - DNA, 15 bp, Homo sapiens
ggcacaagaggcatg

SEQ ID NO: 2113840 - DNA, 15 bp, Homo sapiens
caagaggcatgaaaa

SEQ ID NO: 2113841 - DNA, 15 bp, Homo sapiens
aagaggcatgaaaag

SEQ ID NO: 2113842 - DNA, 15 bp, Homo sapiens
agaggcatgaaaagc

SEQ ID NO: 2113843 - DNA, 15 bp, Homo sapiens
gaggcatgaaaagca

SEQ ID NO: 2113844 - DNA, 15 bp, Homo sapiens
aggcatgaaaagcat

SEQ ID NO: 2113845 - DNA, 15 bp, Homo sapiens
ggcatgaaaagcatc

SEQ ID NO: 2113846 - DNA, 15 bp, Homo sapiens
gcatgaaaagcatca

SEQ ID NO: 2113847 - DNA, 15 bp, Homo sapiens
catgaaaagcatcac

SEQ ID NO: 2113848 - DNA, 15 bp, Homo sapiens
atgaaaagcatcaca

SEQ ID NO: 2113849 - DNA, 15 bp, Homo sapiens
tgaaaagcatcacag

SEQ ID NO: 2113850 - DNA, 15 bp, Homo sapiens
gaaaagcatcacaga

SEQ ID NO: 2113851 - DNA, 15 bp, Homo sapiens
aaaagcatcacagaa

SEQ ID NO: 2113852 - DNA, 15 bp, Homo sapiens
aaagcatcacagaaa

SEQ ID NO: 2113853 - DNA, 15 bp, Homo sapiens
aagcatcacagaaag

SEQ ID NO: 2113854 - DNA, 15 bp, Homo sapiens
agcatcacagaaaga

SEQ ID NO: 2113855 - DNA, 15 bp, Homo sapiens
gcatcacagaaagat

SEQ ID NO: 2113856 - DNA, 15 bp, Homo sapiens
catcacagaaagata

SEQ ID NO: 2113857 - DNA, 15 bp, Homo sapiens
atcacagaaagataa

SEQ ID NO: 2113858 - DNA, 15 bp, Homo sapiens
tcacagaaagataaa

SEQ ID NO: 2113859 - DNA, 15 bp, Homo sapiens
cacagaaagataaaa

SEQ ID NO: 2113860 - DNA, 15 bp, Homo sapiens
acagaaagataaaaa

SEQ ID NO: 2113861 - DNA, 15 bp, Homo sapiens
cagaaagataaaaaa

SEQ ID NO: 2113862 - DNA, 15 bp, Homo sapiens
agaaagataaaaaaa

SEQ ID NO: 2113863 - DNA, 15 bp, Homo sapiens
gaaagataaaaaaaa

SEQ ID NO: 2113864 - DNA, 15 bp, Homo sapiens
aaagataaaaaaaat

SEQ ID NO: 2113865 - DNA, 15 bp, Homo sapiens
aagataaaaaaaatc

SEQ ID NO: 2113866 - DNA, 15 bp, Homo sapiens
agataaaaaaaatca

SEQ ID NO: 2113867 - DNA, 15 bp, Homo sapiens
gataaaaaaaatcaa

SEQ ID NO: 2113868 - DNA, 15 bp, Homo sapiens
ataaaaaaaatcaaa

SEQ ID NO: 2113869 - DNA, 15 bp, Homo sapiens
taaaaaaaatcaaaa

SEQ ID NO: 2113870 - DNA, 15 bp, Homo sapiens
aaaaaaaatcaaaaa

SEQ ID NO: 2113871 - DNA, 15 bp, Homo sapiens
aaaaaaatcaaaaag

SEQ ID NO: 2113872 - DNA, 15 bp, Homo sapiens
aaaaaatcaaaaagt

SEQ ID NO: 2113873 - DNA, 15 bp, Homo sapiens
aaaaatcaaaaagtg

SEQ ID NO: 2113874 - DNA, 15 bp, Homo sapiens
aaaatcaaaaagtgt

SEQ ID NO: 2113875 - DNA, 15 bp, Homo sapiens
aaatcaaaaagtgtc

SEQ ID NO: 2113876 - DNA, 15 bp, Homo sapiens
aatcaaaaagtgtca

SEQ ID NO: 2113877 - DNA, 15 bp, Homo sapiens
atcaaaaagtgtcat

SEQ ID NO: 2113878 - DNA, 15 bp, Homo sapiens
tcaaaaagtgtcatt

SEQ ID NO: 2113879 - DNA, 15 bp, Homo sapiens
caaaaagtgtcatta

SEQ ID NO: 2113880 - DNA, 15 bp, Homo sapiens
aaaaagtgtcattag

SEQ ID NO: 2113881 - DNA, 15 bp, Homo sapiens
aaaagtgtcattagt

SEQ ID NO: 2113882 - DNA, 15 bp, Homo sapiens
aaagtgtcattagta

SEQ ID NO: 2113883 - DNA, 15 bp, Homo sapiens
aagtgtcattagtaa

SEQ ID NO: 2113884 - DNA, 15 bp, Homo sapiens
agtgtcattagtaat

SEQ ID NO: 2113885 - DNA, 15 bp, Homo sapiens
gtgtcattagtaatt

SEQ ID NO: 2113886 - DNA, 15 bp, Homo sapiens
tgtcattagtaatta

SEQ ID NO: 2113887 - DNA, 15 bp, Homo sapiens
gtcattagtaattat

SEQ ID NO: 2113888 - DNA, 15 bp, Homo sapiens
tcattagtaattata

SEQ ID NO: 2113889 - DNA, 15 bp, Homo sapiens
cattagtaattataa

SEQ ID NO: 2113890 - DNA, 15 bp, Homo sapiens
attagtaattataat

SEQ ID NO: 2113891 - DNA, 15 bp, Homo sapiens
ttagtaattataata

SEQ ID NO: 2113892 - DNA, 15 bp, Homo sapiens
tagtaattataataa

SEQ ID NO: 2113893 - DNA, 15 bp, Homo sapiens
agtaattataataaa

SEQ ID NO: 2113894 - DNA, 15 bp, Homo sapiens
gtaattataataaac

SEQ ID NO: 2113895 - DNA, 15 bp, Homo sapiens
taattataataaact

SEQ ID NO: 2113896 - DNA, 15 bp, Homo sapiens
aattataataaacta

SEQ ID NO: 2113897 - DNA, 15 bp, Homo sapiens
attataataaactat

SEQ ID NO: 2113898 - DNA, 15 bp, Homo sapiens
ttataataaactatt

SEQ ID NO: 2113899 - DNA, 15 bp, Homo sapiens
tataataaactattg

SEQ ID NO: 2113900 - DNA, 15 bp, Homo sapiens
ataataaactattgt

SEQ ID NO: 2113901 - DNA, 15 bp, Homo sapiens
taataaactattgtt

SEQ ID NO: 2113902 - DNA, 15 bp, Homo sapiens
aataaactattgtta

SEQ ID NO: 2113903 - DNA, 15 bp, Homo sapiens
ataaactattgttac

SEQ ID NO: 2113904 - DNA, 15 bp, Homo sapiens
taaactattgttact

SEQ ID NO: 2113905 - DNA, 15 bp, Homo sapiens
aaactattgttacta

SEQ ID NO: 2113906 - DNA, 15 bp, Homo sapiens
aactattgttactac

SEQ ID NO: 2113907 - DNA, 15 bp, Homo sapiens
actattgttactacg

SEQ ID NO: 2113908 - DNA, 15 bp, Homo sapiens
ctattgttactacga

SEQ ID NO: 2113909 - DNA, 15 bp, Homo sapiens
tattgttactacgaa

SEQ ID NO: 2113910 - DNA, 15 bp, Homo sapiens
attgttactacgaat

SEQ ID NO: 2113911 - DNA, 15 bp, Homo sapiens
ttgttactacgaata

SEQ ID NO: 2113912 - DNA, 15 bp, Homo sapiens
tgttactacgaatac

SEQ ID NO: 2113913 - DNA, 15 bp, Homo sapiens
gttactacgaatact

SEQ ID NO: 2113914 - DNA, 15 bp, Homo sapiens
ttactacgaatacta

SEQ ID NO: 2113915 - DNA, 15 bp, Homo sapiens
tactacgaatactac

SEQ ID NO: 2113916 - DNA, 15 bp, Homo sapiens
actacgaatactact

SEQ ID NO: 2113917 - DNA, 15 bp, Homo sapiens
ctacgaatactactt

SEQ ID NO: 2113918 - DNA, 15 bp, Homo sapiens
tacgaatactactta

SEQ ID NO: 2113919 - DNA, 15 bp, Homo sapiens
acgaatactacttat

SEQ ID NO: 2113920 - DNA, 15 bp, Homo sapiens
cgaatactacttata

SEQ ID NO: 2113921 - DNA, 15 bp, Homo sapiens
gaatactacttatag

SEQ ID NO: 2113922 - DNA, 15 bp, Homo sapiens
aatactacttatagt

SEQ ID NO: 2113923 - DNA, 15 bp, Homo sapiens
atactacttatagta

SEQ ID NO: 2113924 - DNA, 15 bp, Homo sapiens
tactacttatagtac

SEQ ID NO: 2113925 - DNA, 15 bp, Homo sapiens
actacttatagtact

SEQ ID NO: 2113926 - DNA, 15 bp, Homo sapiens
ctacttatagtacta

SEQ ID NO: 2113927 - DNA, 15 bp, Homo sapiens
tacttatagtactac

SEQ ID NO: 2113928 - DNA, 15 bp, Homo sapiens
acttatagtactaca

SEQ ID NO: 2113929 - DNA, 15 bp, Homo sapiens
cttatagtactacaa

SEQ ID NO: 2113930 - DNA, 15 bp, Homo sapiens
ttatagtactacaat

SEQ ID NO: 2113931 - DNA, 15 bp, Homo sapiens
tatagtactacaata

SEQ ID NO: 2113932 - DNA, 15 bp, Homo sapiens
atagtactacaataa

SEQ ID NO: 2113933 - DNA, 15 bp, Homo sapiens
tagtactacaataat

SEQ ID NO: 2113934 - DNA, 15 bp, Homo sapiens
agtactacaataata

SEQ ID NO: 2113935 - DNA, 15 bp, Homo sapiens
gtactacaataataa

SEQ ID NO: 2113936 - DNA, 15 bp, Homo sapiens
tactacaataataac

SEQ ID NO: 2113937 - DNA, 15 bp, Homo sapiens
actacaataataaca

SEQ ID NO: 2113938 - DNA, 15 bp, Homo sapiens
ctacaataataacaa

SEQ ID NO: 2113939 - DNA, 15 bp, Homo sapiens
tacaataataacaac

SEQ ID NO: 2113940 - DNA, 15 bp, Homo sapiens
acaataataacaacc

SEQ ID NO: 2113941 - DNA, 15 bp, Homo sapiens
caataataacaacca

SEQ ID NO: 2113942 - DNA, 15 bp, Homo sapiens
aataataacaaccac

SEQ ID NO: 2113943 - DNA, 15 bp, Homo sapiens
ataataacaaccacc

SEQ ID NO: 2113944 - DNA, 15 bp, Homo sapiens
taataacaaccacca

SEQ ID NO: 2113945 - DNA, 15 bp, Homo sapiens
aataacaaccaccaa

SEQ ID NO: 2113946 - DNA, 15 bp, Homo sapiens
ataacaaccaccaat

SEQ ID NO: 2113947 - DNA, 15 bp, Homo sapiens
taacaaccaccaata

SEQ ID NO: 2113948 - DNA, 15 bp, Homo sapiens
aacaaccaccaatac

SEQ ID NO: 2113949 - DNA, 15 bp, Homo sapiens
acaaccaccaatacc

SEQ ID NO: 2113950 - DNA, 15 bp, Homo sapiens
caaccaccaatacca

SEQ ID NO: 2113951 - DNA, 15 bp, Homo sapiens
aaccaccaataccaa

SEQ ID NO: 2113952 - DNA, 15 bp, Homo sapiens
gaagactggtcatct

SEQ ID NO: 2113953 - DNA, 15 bp, Homo sapiens
aagactggtcatctt

SEQ ID NO: 2113954 - DNA, 15 bp, Homo sapiens
agactggtcatcttt

SEQ ID NO: 2113955 - DNA, 15 bp, Homo sapiens
gactggtcatctttc

SEQ ID NO: 2113956 - DNA, 15 bp, Homo sapiens
actggtcatctttcc

SEQ ID NO: 2113957 - DNA, 15 bp, Homo sapiens
ctggtcatctttcca

SEQ ID NO: 2113958 - DNA, 15 bp, Homo sapiens
tggtcatctttccat

SEQ ID NO: 2113959 - DNA, 15 bp, Homo sapiens
ggtcatctttccatc

SEQ ID NO: 2113960 - DNA, 15 bp, Homo sapiens
gtcatctttccatct

SEQ ID NO: 2113961 - DNA, 15 bp, Homo sapiens
tcatctttccatctc

SEQ ID NO: 2113962 - DNA, 15 bp, Homo sapiens
catctttccatctca

SEQ ID NO: 2113963 - DNA, 15 bp, Homo sapiens
atctttccatctcac

SEQ ID NO: 2113964 - DNA, 15 bp, Homo sapiens
tctttccatctcaca

SEQ ID NO: 2113965 - DNA, 15 bp, Homo sapiens
ctttccatctcacat

SEQ ID NO: 2113966 - DNA, 15 bp, Homo sapiens
tttccatctcacatt

SEQ ID NO: 2113967 - DNA, 15 bp, Homo sapiens
ttccatctcacattt

SEQ ID NO: 2113968 - DNA, 15 bp, Homo sapiens
tccatctcacattta

SEQ ID NO: 2113969 - DNA, 15 bp, Homo sapiens
ccatctcacatttag

SEQ ID NO: 2113970 - DNA, 15 bp, Homo sapiens
catctcacatttagc

SEQ ID NO: 2113971 - DNA, 15 bp, Homo sapiens
atctcacatttagcc

SEQ ID NO: 2113972 - DNA, 15 bp, Homo sapiens
tctcacatttagccc

SEQ ID NO: 2113973 - DNA, 15 bp, Homo sapiens
ctcacatttagcccc

SEQ ID NO: 2113974 - DNA, 15 bp, Homo sapiens
tcacatttagcccca

SEQ ID NO: 2113975 - DNA, 15 bp, Homo sapiens
cacatttagccccac

SEQ ID NO: 2113976 - DNA, 15 bp, Homo sapiens
acatttagccccact

SEQ ID NO: 2113977 - DNA, 15 bp, Homo sapiens
catttagccccactt

SEQ ID NO: 2113978 - DNA, 15 bp, Homo sapiens
atttagccccacttc

SEQ ID NO: 2113979 - DNA, 15 bp, Homo sapiens
tttagccccacttca

SEQ ID NO: 2113980 - DNA, 15 bp, Homo sapiens
ttagccccacttcac

SEQ ID NO: 2113981 - DNA, 15 bp, Homo sapiens
tagccccacttcaca

SEQ ID NO: 2113982 - DNA, 15 bp, Homo sapiens
agccccacttcacat

SEQ ID NO: 2113983 - DNA, 15 bp, Homo sapiens
gccccacttcacatt

SEQ ID NO: 2113984 - DNA, 15 bp, Homo sapiens
ccccacttcacatta

SEQ ID NO: 2113985 - DNA, 15 bp, Homo sapiens
cccacttcacattag

SEQ ID NO: 2113986 - DNA, 15 bp, Homo sapiens
ccacttcacattaga

SEQ ID NO: 2113987 - DNA, 15 bp, Homo sapiens
cacttcacattagac

SEQ ID NO: 2113988 - DNA, 15 bp, Homo sapiens
acttcacattagacc

SEQ ID NO: 2113989 - DNA, 15 bp, Homo sapiens
cttcacattagacca

SEQ ID NO: 2113990 - DNA, 15 bp, Homo sapiens
ttcacattagaccaa

SEQ ID NO: 2113991 - DNA, 15 bp, Homo sapiens
tcacattagaccaac

SEQ ID NO: 2113992 - DNA, 15 bp, Homo sapiens
cacattagaccaaca

SEQ ID NO: 2113993 - DNA, 15 bp, Homo sapiens
acattagaccaacac

SEQ ID NO: 2113994 - DNA, 15 bp, Homo sapiens
cattagaccaacaca

SEQ ID NO: 2113995 - DNA, 15 bp, Homo sapiens
attagaccaacacac

SEQ ID NO: 2113996 - DNA, 15 bp, Homo sapiens
ttagaccaacacacc

SEQ ID NO: 2113997 - DNA, 15 bp, Homo sapiens
tagaccaacacaccc

SEQ ID NO: 2113998 - DNA, 15 bp, Homo sapiens
agaccaacacacccc

SEQ ID NO: 2113999 - DNA, 15 bp, Homo sapiens
gaccaacacacccca

SEQ ID NO: 2114000 - DNA, 15 bp, Homo sapiens
accaacacaccccat

SEQ ID NO: 2114001 - DNA, 15 bp, Homo sapiens
ccaacacaccccatc

SEQ ID NO: 2114002 - DNA, 15 bp, Homo sapiens
caacacaccccatcc

SEQ ID NO: 2114003 - DNA, 15 bp, Homo sapiens
aacacaccccatcca

SEQ ID NO: 2114004 - DNA, 15 bp, Homo sapiens
acacaccccatccaa

SEQ ID NO: 2114005 - DNA, 15 bp, Homo sapiens
cacaccccatccaac

SEQ ID NO: 2114006 - DNA, 15 bp, Homo sapiens
acaccccatccaaca

SEQ ID NO: 2114007 - DNA, 15 bp, Homo sapiens
caccccatccaacac

SEQ ID NO: 2114008 - DNA, 15 bp, Homo sapiens
accccatccaacacc

SEQ ID NO: 2114009 - DNA, 15 bp, Homo sapiens
ccccatccaacacca

SEQ ID NO: 2114010 - DNA, 15 bp, Homo sapiens
cccatccaacaccag

SEQ ID NO: 2114011 - DNA, 15 bp, Homo sapiens
ccatccaacaccagc

SEQ ID NO: 2114012 - DNA, 15 bp, Homo sapiens
catccaacaccagct

SEQ ID NO: 2114013 - DNA, 15 bp, Homo sapiens
atccaacaccagctc

SEQ ID NO: 2114014 - DNA, 15 bp, Homo sapiens
tccaacaccagctcc

SEQ ID NO: 2114015 - DNA, 15 bp, Homo sapiens
ccaacaccagctccc

SEQ ID NO: 2114016 - DNA, 15 bp, Homo sapiens
caacaccagctccca

SEQ ID NO: 2114017 - DNA, 15 bp, Homo sapiens
aacaccagctcccaa

SEQ ID NO: 2114018 - DNA, 15 bp, Homo sapiens
acaccagctcccaaa

SEQ ID NO: 2114019 - DNA, 15 bp, Homo sapiens
caccagctcccaaaa

SEQ ID NO: 2114020 - DNA, 15 bp, Homo sapiens
accagctcccaaaaa

SEQ ID NO: 2114021 - DNA, 15 bp, Homo sapiens
ccagctcccaaaaaa

SEQ ID NO: 2114022 - DNA, 15 bp, Homo sapiens
cagctcccaaaaaac

SEQ ID NO: 2114023 - DNA, 15 bp, Homo sapiens
agctcccaaaaaaca

SEQ ID NO: 2114024 - DNA, 15 bp, Homo sapiens
gctcccaaaaaacag

SEQ ID NO: 2114025 - DNA, 15 bp, Homo sapiens
ctcccaaaaaacagc

SEQ ID NO: 2114026 - DNA, 15 bp, Homo sapiens
tcccaaaaaacagct

SEQ ID NO: 2114027 - DNA, 15 bp, Homo sapiens
cccaaaaaacagctg

SEQ ID NO: 2114028 - DNA, 15 bp, Homo sapiens
ccaaaaaacagctgt

SEQ ID NO: 2114029 - DNA, 15 bp, Homo sapiens
caaaaaacagctgtt

SEQ ID NO: 2114030 - DNA, 15 bp, Homo sapiens
aaaaaacagctgtta

SEQ ID NO: 2114031 - DNA, 15 bp, Homo sapiens
aaaaacagctgttat

SEQ ID NO: 2114032 - DNA, 15 bp, Homo sapiens
aaaacagctgttata

SEQ ID NO: 2114033 - DNA, 15 bp, Homo sapiens
aaacagctgttataa

SEQ ID NO: 2114034 - DNA, 15 bp, Homo sapiens
aacagctgttataac

SEQ ID NO: 2114035 - DNA, 15 bp, Homo sapiens
acagctgttataaca

SEQ ID NO: 2114036 - DNA, 15 bp, Homo sapiens
cagctgttataacag

SEQ ID NO: 2114037 - DNA, 15 bp, Homo sapiens
agctgttataacagt

SEQ ID NO: 2114038 - DNA, 15 bp, Homo sapiens
gctgttataacagtt

SEQ ID NO: 2114039 - DNA, 15 bp, Homo sapiens
ctgttataacagttc

SEQ ID NO: 2114040 - DNA, 15 bp, Homo sapiens
tgttataacagttct

SEQ ID NO: 2114041 - DNA, 15 bp, Homo sapiens
gttataacagttctg

SEQ ID NO: 2114042 - DNA, 15 bp, Homo sapiens
ttataacagttctga

SEQ ID NO: 2114043 - DNA, 15 bp, Homo sapiens
tataacagttctgaa

SEQ ID NO: 2114044 - DNA, 15 bp, Homo sapiens
ataacagttctgaag

SEQ ID NO: 2114045 - DNA, 15 bp, Homo sapiens
taacagttctgaagt

SEQ ID NO: 2114046 - DNA, 15 bp, Homo sapiens
aacagttctgaagtg

SEQ ID NO: 2114047 - DNA, 15 bp, Homo sapiens
acagttctgaagtga

SEQ ID NO: 2114048 - DNA, 15 bp, Homo sapiens
cagttctgaagtgat

SEQ ID NO: 2114049 - DNA, 15 bp, Homo sapiens
agttctgaagtgatc

SEQ ID NO: 2114050 - DNA, 15 bp, Homo sapiens
gttctgaagtgatcc

SEQ ID NO: 2114051 - DNA, 15 bp, Homo sapiens
ttctgaagtgatcct

SEQ ID NO: 2114052 - DNA, 15 bp, Homo sapiens
tctgaagtgatcctc

SEQ ID NO: 2114053 - DNA, 15 bp, Homo sapiens
ctgaagtgatcctca

SEQ ID NO: 2114054 - DNA, 15 bp, Homo sapiens
tgaagtgatcctcac

SEQ ID NO: 2114055 - DNA, 15 bp, Homo sapiens
gaagtgatcctcaca

SEQ ID NO: 2114056 - DNA, 15 bp, Homo sapiens
aagtgatcctcacag

SEQ ID NO: 2114057 - DNA, 15 bp, Homo sapiens
agtgatcctcacagg

SEQ ID NO: 2114058 - DNA, 15 bp, Homo sapiens
gtgatcctcacagga

SEQ ID NO: 2114059 - DNA, 15 bp, Homo sapiens
tgatcctcacaggac

SEQ ID NO: 2114060 - DNA, 15 bp, Homo sapiens
gatcctcacaggact

SEQ ID NO: 2114061 - DNA, 15 bp, Homo sapiens
atcctcacaggactg

SEQ ID NO: 2114062 - DNA, 15 bp, Homo sapiens
tcctcacaggactgc

SEQ ID NO: 2114063 - DNA, 15 bp, Homo sapiens
cctcacaggactgca

SEQ ID NO: 2114064 - DNA, 15 bp, Homo sapiens
ctcacaggactgcaa

SEQ ID NO: 2114065 - DNA, 15 bp, Homo sapiens
tcacaggactgcaac

SEQ ID NO: 2114066 - DNA, 15 bp, Homo sapiens
cacaggactgcaaca

SEQ ID NO: 2114067 - DNA, 15 bp, Homo sapiens
acaggactgcaacat

SEQ ID NO: 2114068 - DNA, 15 bp, Homo sapiens
caggactgcaacatc

SEQ ID NO: 2114069 - DNA, 15 bp, Homo sapiens
aggactgcaacatca

SEQ ID NO: 2114070 - DNA, 15 bp, Homo sapiens
ggactgcaacatcaa

SEQ ID NO: 2114071 - DNA, 15 bp, Homo sapiens
gactgcaacatcaac

SEQ ID NO: 2114072 - DNA, 15 bp, Homo sapiens
actgcaacatcaaca

SEQ ID NO: 2114073 - DNA, 15 bp, Homo sapiens
ctgcaacatcaacaa

SEQ ID NO: 2114074 - DNA, 15 bp, Homo sapiens
tgcaacatcaacaac

SEQ ID NO: 2114075 - DNA, 15 bp, Homo sapiens
gcaacatcaacaact

SEQ ID NO: 2114076 - DNA, 15 bp, Homo sapiens
caacatcaacaactt

SEQ ID NO: 2114077 - DNA, 15 bp, Homo sapiens
aacatcaacaactta

SEQ ID NO: 2114078 - DNA, 15 bp, Homo sapiens
acatcaacaacttac

SEQ ID NO: 2114079 - DNA, 15 bp, Homo sapiens
catcaacaacttact

SEQ ID NO: 2114080 - DNA, 15 bp, Homo sapiens
atcaacaacttactt

SEQ ID NO: 2114081 - DNA, 15 bp, Homo sapiens
tcaacaacttacttc

SEQ ID NO: 2114082 - DNA, 15 bp, Homo sapiens
caacaacttacttca

SEQ ID NO: 2114083 - DNA, 15 bp, Homo sapiens
aacaacttacttcat

SEQ ID NO: 2114084 - DNA, 15 bp, Homo sapiens
acaacttacttcatt

SEQ ID NO: 2114085 - DNA, 15 bp, Homo sapiens
caacttacttcattc

SEQ ID NO: 2114086 - DNA, 15 bp, Homo sapiens
aacttacttcattca

SEQ ID NO: 2114087 - DNA, 15 bp, Homo sapiens
acttacttcattcag

SEQ ID NO: 2114088 - DNA, 15 bp, Homo sapiens
cttacttcattcagc

SEQ ID NO: 2114089 - DNA, 15 bp, Homo sapiens
ttacttcattcagct

SEQ ID NO: 2114090 - DNA, 15 bp, Homo sapiens
tacttcattcagcta

SEQ ID NO: 2114091 - DNA, 15 bp, Homo sapiens
acttcattcagctat

SEQ ID NO: 2114092 - DNA, 15 bp, Homo sapiens
cttcattcagctatc

SEQ ID NO: 2114093 - DNA, 15 bp, Homo sapiens
ttcattcagctatcc

SEQ ID NO: 2114094 - DNA, 15 bp, Homo sapiens
tcattcagctatcct

SEQ ID NO: 2114095 - DNA, 15 bp, Homo sapiens
cattcagctatcctc

SEQ ID NO: 2114096 - DNA, 15 bp, Homo sapiens
attcagctatcctca

SEQ ID NO: 2114097 - DNA, 15 bp, Homo sapiens
ttcagctatcctcaa

SEQ ID NO: 2114098 - DNA, 15 bp, Homo sapiens
tcagctatcctcaag

SEQ ID NO: 2114099 - DNA, 15 bp, Homo sapiens
cagctatcctcaagt

SEQ ID NO: 2114100 - DNA, 15 bp, Homo sapiens
agctatcctcaagtg

SEQ ID NO: 2114101 - DNA, 15 bp, Homo sapiens
gctatcctcaagtgc

SEQ ID NO: 2114102 - DNA, 15 bp, Homo sapiens
ctatcctcaagtgct

SEQ ID NO: 2114103 - DNA, 15 bp, Homo sapiens
tatcctcaagtgcta

SEQ ID NO: 2114104 - DNA, 15 bp, Homo sapiens
atcctcaagtgctag

SEQ ID NO: 2114105 - DNA, 15 bp, Homo sapiens
tcctcaagtgctaga

SEQ ID NO: 2114106 - DNA, 15 bp, Homo sapiens
cctcaagtgctagag

SEQ ID NO: 2114107 - DNA, 15 bp, Homo sapiens
ctcaagtgctagagt

SEQ ID NO: 2114108 - DNA, 15 bp, Homo sapiens
tcaagtgctagagtg

SEQ ID NO: 2114109 - DNA, 15 bp, Homo sapiens
caagtgctagagtgc

SEQ ID NO: 2114110 - DNA, 15 bp, Homo sapiens
aagtgctagagtgcc

SEQ ID NO: 2114111 - DNA, 15 bp, Homo sapiens
agtgctagagtgcca

SEQ ID NO: 2114112 - DNA, 15 bp, Homo sapiens
gtgctagagtgccag

SEQ ID NO: 2114113 - DNA, 15 bp, Homo sapiens
tgctagagtgccagg

SEQ ID NO: 2114114 - DNA, 15 bp, Homo sapiens
gctagagtgccaggc

SEQ ID NO: 2114115 - DNA, 15 bp, Homo sapiens
ctagagtgccaggca

SEQ ID NO: 2114116 - DNA, 15 bp, Homo sapiens
tagagtgccaggcat

SEQ ID NO: 2114117 - DNA, 15 bp, Homo sapiens
agagtgccaggcatg

SEQ ID NO: 2114118 - DNA, 15 bp, Homo sapiens
gagtgccaggcatgt

SEQ ID NO: 2114119 - DNA, 15 bp, Homo sapiens
agtgccaggcatgtt

SEQ ID NO: 2114120 - DNA, 15 bp, Homo sapiens
gtgccaggcatgttg

SEQ ID NO: 2114121 - DNA, 15 bp, Homo sapiens
tgccaggcatgttga

SEQ ID NO: 2114122 - DNA, 15 bp, Homo sapiens
gccaggcatgttgat

SEQ ID NO: 2114123 - DNA, 15 bp, Homo sapiens
ccaggcatgttgatc

SEQ ID NO: 2114124 - DNA, 15 bp, Homo sapiens
caggcatgttgatct

SEQ ID NO: 2114125 - DNA, 15 bp, Homo sapiens
aggcatgttgatctt

SEQ ID NO: 2114126 - DNA, 15 bp, Homo sapiens
ggcatgttgatcttc

SEQ ID NO: 2114127 - DNA, 15 bp, Homo sapiens
gcatgttgatcttca

SEQ ID NO: 2114128 - DNA, 15 bp, Homo sapiens
catgttgatcttcag

SEQ ID NO: 2114129 - DNA, 15 bp, Homo sapiens
atgttgatcttcagg

SEQ ID NO: 2114130 - DNA, 15 bp, Homo sapiens
tgttgatcttcaggt

SEQ ID NO: 2114131 - DNA, 15 bp, Homo sapiens
gttgatcttcaggtg

SEQ ID NO: 2114132 - DNA, 15 bp, Homo sapiens
ttgatcttcaggtgg

SEQ ID NO: 2114133 - DNA, 15 bp, Homo sapiens
tgatcttcaggtggg

SEQ ID NO: 2114134 - DNA, 15 bp, Homo sapiens
gatcttcaggtggga

SEQ ID NO: 2114135 - DNA, 15 bp, Homo sapiens
atcttcaggtgggaa

SEQ ID NO: 2114136 - DNA, 15 bp, Homo sapiens
tcttcaggtgggaag

SEQ ID NO: 2114137 - DNA, 15 bp, Homo sapiens
cttcaggtgggaagg

SEQ ID NO: 2114138 - DNA, 15 bp, Homo sapiens
ttcaggtgggaaggc

SEQ ID NO: 2114139 - DNA, 15 bp, Homo sapiens
tcaggtgggaaggct

SEQ ID NO: 2114140 - DNA, 15 bp, Homo sapiens
caggtgggaaggctg

SEQ ID NO: 2114141 - DNA, 15 bp, Homo sapiens
aggtgggaaggctga

SEQ ID NO: 2114142 - DNA, 15 bp, Homo sapiens
ggtgggaaggctgac

SEQ ID NO: 2114143 - DNA, 15 bp, Homo sapiens
gtgggaaggctgact

SEQ ID NO: 2114144 - DNA, 15 bp, Homo sapiens
tgggaaggctgactt

SEQ ID NO: 2114145 - DNA, 15 bp, Homo sapiens
gggaaggctgacttc

SEQ ID NO: 2114146 - DNA, 15 bp, Homo sapiens
ggaaggctgacttcc

SEQ ID NO: 2114147 - DNA, 15 bp, Homo sapiens
gaaggctgacttcct

SEQ ID NO: 2114148 - DNA, 15 bp, Homo sapiens
aaggctgacttcctt

SEQ ID NO: 2114149 - DNA, 15 bp, Homo sapiens
aggctgacttccttc

SEQ ID NO: 2114150 - DNA, 15 bp, Homo sapiens
ggctgacttccttca

SEQ ID NO: 2114151 - DNA, 15 bp, Homo sapiens
gctgacttccttcag

SEQ ID NO: 2114152 - DNA, 15 bp, Homo sapiens
ctgacttccttcagt

SEQ ID NO: 2114153 - DNA, 15 bp, Homo sapiens
tgacttccttcagtg

SEQ ID NO: 2114154 - DNA, 15 bp, Homo sapiens
gacttccttcagtgt

SEQ ID NO: 2114155 - DNA, 15 bp, Homo sapiens
acttccttcagtgtg

SEQ ID NO: 2114156 - DNA, 15 bp, Homo sapiens
cttccttcagtgtgt

SEQ ID NO: 2114157 - DNA, 15 bp, Homo sapiens
ttccttcagtgtgtt

SEQ ID NO: 2114158 - DNA, 15 bp, Homo sapiens
tccttcagtgtgttc

SEQ ID NO: 2114159 - DNA, 15 bp, Homo sapiens
ccttcagtgtgttca

SEQ ID NO: 2114160 - DNA, 15 bp, Homo sapiens
cttcagtgtgttcaa

SEQ ID NO: 2114161 - DNA, 15 bp, Homo sapiens
ttcagtgtgttcaaa

SEQ ID NO: 2114162 - DNA, 15 bp, Homo sapiens
tcagtgtgttcaaat

SEQ ID NO: 2114163 - DNA, 15 bp, Homo sapiens
cagtgtgttcaaatt

SEQ ID NO: 2114164 - DNA, 15 bp, Homo sapiens
agtgtgttcaaattt

SEQ ID NO: 2114165 - DNA, 15 bp, Homo sapiens
gtgtgttcaaatttc

SEQ ID NO: 2114166 - DNA, 15 bp, Homo sapiens
tgtgttcaaatttct

SEQ ID NO: 2114167 - DNA, 15 bp, Homo sapiens
gtgttcaaatttctt

SEQ ID NO: 2114168 - DNA, 15 bp, Homo sapiens
tgttcaaatttcttg

SEQ ID NO: 2114169 - DNA, 15 bp, Homo sapiens
gttcaaatttcttgg

SEQ ID NO: 2114170 - DNA, 15 bp, Homo sapiens
ttcaaatttcttgga

SEQ ID NO: 2114171 - DNA, 15 bp, Homo sapiens
tcaaatttcttggac

SEQ ID NO: 2114172 - DNA, 15 bp, Homo sapiens
caaatttcttggacc

SEQ ID NO: 2114173 - DNA, 15 bp, Homo sapiens
aaatttcttggacct

SEQ ID NO: 2114174 - DNA, 15 bp, Homo sapiens
aatttcttggacctg

SEQ ID NO: 2114175 - DNA, 15 bp, Homo sapiens
atttcttggacctgc

SEQ ID NO: 2114176 - DNA, 15 bp, Homo sapiens
tttcttggacctgct

SEQ ID NO: 2114177 - DNA, 15 bp, Homo sapiens
ttcttggacctgctg

SEQ ID NO: 2114178 - DNA, 15 bp, Homo sapiens
tcttggacctgctga

SEQ ID NO: 2114179 - DNA, 15 bp, Homo sapiens
cttggacctgctgaa

SEQ ID NO: 2114180 - DNA, 15 bp, Homo sapiens
ttggacctgctgaag

SEQ ID NO: 2114181 - DNA, 15 bp, Homo sapiens
tggacctgctgaaga

SEQ ID NO: 2114182 - DNA, 15 bp, Homo sapiens
ggacctgctgaagac

SEQ ID NO: 2114183 - DNA, 15 bp, Homo sapiens
gacctgctgaagact

SEQ ID NO: 2114184 - DNA, 15 bp, Homo sapiens
acctgctgaagactc

SEQ ID NO: 2114185 - DNA, 15 bp, Homo sapiens
cctgctgaagactca

SEQ ID NO: 2114186 - DNA, 15 bp, Homo sapiens
ctgctgaagactcag

SEQ ID NO: 2114187 - DNA, 15 bp, Homo sapiens
tgctgaagactcagc

SEQ ID NO: 2114188 - DNA, 15 bp, Homo sapiens
gctgaagactcagct

SEQ ID NO: 2114189 - DNA, 15 bp, Homo sapiens
ctgaagactcagctc

SEQ ID NO: 2114190 - DNA, 15 bp, Homo sapiens
tgaagactcagctct

SEQ ID NO: 2114191 - DNA, 15 bp, Homo sapiens
gaagactcagctctc

SEQ ID NO: 2114192 - DNA, 15 bp, Homo sapiens
aagactcagctctct

SEQ ID NO: 2114193 - DNA, 15 bp, Homo sapiens
agactcagctctctg

SEQ ID NO: 2114194 - DNA, 15 bp, Homo sapiens
gactcagctctctgc

SEQ ID NO: 2114195 - DNA, 15 bp, Homo sapiens
actcagctctctgca

SEQ ID NO: 2114196 - DNA, 15 bp, Homo sapiens
ctcagctctctgcac

SEQ ID NO: 2114197 - DNA, 15 bp, Homo sapiens
tcagctctctgcact

SEQ ID NO: 2114198 - DNA, 15 bp, Homo sapiens
cagctctctgcactg

SEQ ID NO: 2114199 - DNA, 15 bp, Homo sapiens
agctctctgcactgc

SEQ ID NO: 2114200 - DNA, 15 bp, Homo sapiens
gctctctgcactgct

SEQ ID NO: 2114201 - DNA, 15 bp, Homo sapiens
ctctctgcactgctt

SEQ ID NO: 2114202 - DNA, 15 bp, Homo sapiens
tctctgcactgcttg

SEQ ID NO: 2114203 - DNA, 15 bp, Homo sapiens
ctctgcactgcttgt

SEQ ID NO: 2114204 - DNA, 15 bp, Homo sapiens
tctgcactgcttgta

SEQ ID NO: 2114205 - DNA, 15 bp, Homo sapiens
ctgcactgcttgtag

SEQ ID NO: 2114206 - DNA, 15 bp, Homo sapiens
tgcactgcttgtagg

SEQ ID NO: 2114207 - DNA, 15 bp, Homo sapiens
gcactgcttgtagga

SEQ ID NO: 2114208 - DNA, 15 bp, Homo sapiens
cactgcttgtaggaa

SEQ ID NO: 2114209 - DNA, 15 bp, Homo sapiens
actgcttgtaggaag

SEQ ID NO: 2114210 - DNA, 15 bp, Homo sapiens
ctgcttgtaggaagt

SEQ ID NO: 2114211 - DNA, 15 bp, Homo sapiens
tgcttgtaggaagta

SEQ ID NO: 2114212 - DNA, 15 bp, Homo sapiens
gcttgtaggaagtat

SEQ ID NO: 2114213 - DNA, 15 bp, Homo sapiens
cttgtaggaagtata

SEQ ID NO: 2114214 - DNA, 15 bp, Homo sapiens
ttgtaggaagtataa

SEQ ID NO: 2114215 - DNA, 15 bp, Homo sapiens
tgtaggaagtataat

SEQ ID NO: 2114216 - DNA, 15 bp, Homo sapiens
gtaggaagtataatg

SEQ ID NO: 2114217 - DNA, 15 bp, Homo sapiens
taggaagtataatga

SEQ ID NO: 2114218 - DNA, 15 bp, Homo sapiens
aggaagtataatgat

SEQ ID NO: 2114219 - DNA, 15 bp, Homo sapiens
ggaagtataatgatt

SEQ ID NO: 2114220 - DNA, 15 bp, Homo sapiens
gaagtataatgattt

SEQ ID NO: 2114221 - DNA, 15 bp, Homo sapiens
aagtataatgatttg

SEQ ID NO: 2114222 - DNA, 15 bp, Homo sapiens
agtataatgatttgg

SEQ ID NO: 2114223 - DNA, 15 bp, Homo sapiens
gtataatgatttggc

SEQ ID NO: 2114224 - DNA, 15 bp, Homo sapiens
tataatgatttggca

SEQ ID NO: 2114225 - DNA, 15 bp, Homo sapiens
ataatgatttggcag

SEQ ID NO: 2114226 - DNA, 15 bp, Homo sapiens
taatgatttggcaga

SEQ ID NO: 2114227 - DNA, 15 bp, Homo sapiens
aatgatttggcagat

SEQ ID NO: 2114228 - DNA, 15 bp, Homo sapiens
atgatttggcagata

SEQ ID NO: 2114229 - DNA, 15 bp, Homo sapiens
tgatttggcagatag

SEQ ID NO: 2114230 - DNA, 15 bp, Homo sapiens
gatttggcagatagg

SEQ ID NO: 2114231 - DNA, 15 bp, Homo sapiens
atttggcagatagga

SEQ ID NO: 2114232 - DNA, 15 bp, Homo sapiens
tttggcagataggaa

SEQ ID NO: 2114233 - DNA, 15 bp, Homo sapiens
ttggcagataggaac

SEQ ID NO: 2114234 - DNA, 15 bp, Homo sapiens
tggcagataggaaca

SEQ ID NO: 2114235 - DNA, 15 bp, Homo sapiens
ggcagataggaacaa

SEQ ID NO: 2114236 - DNA, 15 bp, Homo sapiens
gcagataggaacaat

SEQ ID NO: 2114237 - DNA, 15 bp, Homo sapiens
cagataggaacaatg

SEQ ID NO: 2114238 - DNA, 15 bp, Homo sapiens
agataggaacaatga

SEQ ID NO: 2114239 - DNA, 15 bp, Homo sapiens
gataggaacaatgaa

SEQ ID NO: 2114240 - DNA, 15 bp, Homo sapiens
ataggaacaatgaag

SEQ ID NO: 2114241 - DNA, 15 bp, Homo sapiens
taggaacaatgaaga

SEQ ID NO: 2114242 - DNA, 15 bp, Homo sapiens
aggaacaatgaagag

SEQ ID NO: 2114243 - DNA, 15 bp, Homo sapiens
ggaacaatgaagagc

SEQ ID NO: 2114244 - DNA, 15 bp, Homo sapiens
gaacaatgaagagct

SEQ ID NO: 2114245 - DNA, 15 bp, Homo sapiens
aacaatgaagagcta

SEQ ID NO: 2114246 - DNA, 15 bp, Homo sapiens
acaatgaagagctat

SEQ ID NO: 2114247 - DNA, 15 bp, Homo sapiens
caatgaagagctata

SEQ ID NO: 2114248 - DNA, 15 bp, Homo sapiens
aatgaagagctataa

SEQ ID NO: 2114249 - DNA, 15 bp, Homo sapiens
atgaagagctataaa

SEQ ID NO: 2114250 - DNA, 15 bp, Homo sapiens
tgaagagctataaaa

SEQ ID NO: 2114251 - DNA, 15 bp, Homo sapiens
gaagagctataaaaa

SEQ ID NO: 2114252 - DNA, 15 bp, Homo sapiens
aagagctataaaaaa

SEQ ID NO: 2114253 - DNA, 15 bp, Homo sapiens
agagctataaaaaaa

SEQ ID NO: 2114254 - DNA, 15 bp, Homo sapiens
gagctataaaaaaac

SEQ ID NO: 2114255 - DNA, 15 bp, Homo sapiens
agctataaaaaaaca

SEQ ID NO: 2114256 - DNA, 15 bp, Homo sapiens
gctataaaaaaacat

SEQ ID NO: 2114257 - DNA, 15 bp, Homo sapiens
ctataaaaaaacatg

SEQ ID NO: 2114258 - DNA, 15 bp, Homo sapiens
tataaaaaaacatga

SEQ ID NO: 2114259 - DNA, 15 bp, Homo sapiens
ataaaaaaacatgag

SEQ ID NO: 2114260 - DNA, 15 bp, Homo sapiens
taaaaaaacatgaga

SEQ ID NO: 2114261 - DNA, 15 bp, Homo sapiens
aaaaaaacatgagat

SEQ ID NO: 2114262 - DNA, 15 bp, Homo sapiens
aaaaaacatgagata

SEQ ID NO: 2114263 - DNA, 15 bp, Homo sapiens
aaaaacatgagataa

SEQ ID NO: 2114264 - DNA, 15 bp, Homo sapiens
aaaacatgagataaa

SEQ ID NO: 2114265 - DNA, 15 bp, Homo sapiens
aaacatgagataaac

SEQ ID NO: 2114266 - DNA, 15 bp, Homo sapiens
aacatgagataaacc

SEQ ID NO: 2114267 - DNA, 15 bp, Homo sapiens
acatgagataaacca

SEQ ID NO: 2114268 - DNA, 15 bp, Homo sapiens
catgagataaaccat

SEQ ID NO: 2114269 - DNA, 15 bp, Homo sapiens
atgagataaaccatg

SEQ ID NO: 2114270 - DNA, 15 bp, Homo sapiens
tgagataaaccatgt

SEQ ID NO: 2114271 - DNA, 15 bp, Homo sapiens
gagataaaccatgta

SEQ ID NO: 2114272 - DNA, 15 bp, Homo sapiens
agataaaccatgtaa

SEQ ID NO: 2114273 - DNA, 15 bp, Homo sapiens
gataaaccatgtaaa

SEQ ID NO: 2114274 - DNA, 15 bp, Homo sapiens
ataaaccatgtaaat

SEQ ID NO: 2114275 - DNA, 15 bp, Homo sapiens
taaaccatgtaaatg

SEQ ID NO: 2114276 - DNA, 15 bp, Homo sapiens
aaaccatgtaaatgc

SEQ ID NO: 2114277 - DNA, 15 bp, Homo sapiens
aaccatgtaaatgcc

SEQ ID NO: 2114278 - DNA, 15 bp, Homo sapiens
accatgtaaatgcca

SEQ ID NO: 2114279 - DNA, 15 bp, Homo sapiens
ccatgtaaatgccat

SEQ ID NO: 2114280 - DNA, 15 bp, Homo sapiens
catgtaaatgccata

SEQ ID NO: 2114281 - DNA, 15 bp, Homo sapiens
atgtaaatgccataa

SEQ ID NO: 2114282 - DNA, 15 bp, Homo sapiens
tgtaaatgccataaa

SEQ ID NO: 2114283 - DNA, 15 bp, Homo sapiens
gtaaatgccataaat

SEQ ID NO: 2114284 - DNA, 15 bp, Homo sapiens
taaatgccataaata

SEQ ID NO: 2114285 - DNA, 15 bp, Homo sapiens
aaatgccataaatat

SEQ ID NO: 2114286 - DNA, 15 bp, Homo sapiens
aatgccataaatatt

SEQ ID NO: 2114287 - DNA, 15 bp, Homo sapiens
atgccataaatattg

SEQ ID NO: 2114288 - DNA, 15 bp, Homo sapiens
tgccataaatattga

SEQ ID NO: 2114289 - DNA, 15 bp, Homo sapiens
gccataaatattgag

SEQ ID NO: 2114290 - DNA, 15 bp, Homo sapiens
ccataaatattgagt

SEQ ID NO: 2114291 - DNA, 15 bp, Homo sapiens
cataaatattgagta

SEQ ID NO: 2114292 - DNA, 15 bp, Homo sapiens
ataaatattgagtac

SEQ ID NO: 2114293 - DNA, 15 bp, Homo sapiens
taaatattgagtact

SEQ ID NO: 2114294 - DNA, 15 bp, Homo sapiens
aaatattgagtactg

SEQ ID NO: 2114295 - DNA, 15 bp, Homo sapiens
aatattgagtactgt

SEQ ID NO: 2114296 - DNA, 15 bp, Homo sapiens
atattgagtactgtg

SEQ ID NO: 2114297 - DNA, 15 bp, Homo sapiens
tattgagtactgtgc

SEQ ID NO: 2114298 - DNA, 15 bp, Homo sapiens
attgagtactgtgct

SEQ ID NO: 2114299 - DNA, 15 bp, Homo sapiens
ttgagtactgtgcta

SEQ ID NO: 2114300 - DNA, 15 bp, Homo sapiens
tgagtactgtgctag

SEQ ID NO: 2114301 - DNA, 15 bp, Homo sapiens
gagtactgtgctaga

SEQ ID NO: 2114302 - DNA, 15 bp, Homo sapiens
agtactgtgctagag

SEQ ID NO: 2114303 - DNA, 15 bp, Homo sapiens
gtactgtgctagagt

SEQ ID NO: 2114304 - DNA, 15 bp, Homo sapiens
tactgtgctagagtt

SEQ ID NO: 2114305 - DNA, 15 bp, Homo sapiens
actgtgctagagtta

SEQ ID NO: 2114306 - DNA, 15 bp, Homo sapiens
ctgtgctagagttac

SEQ ID NO: 2114307 - DNA, 15 bp, Homo sapiens
tgtgctagagttaca

SEQ ID NO: 2114308 - DNA, 15 bp, Homo sapiens
gtgctagagttacat

SEQ ID NO: 2114309 - DNA, 15 bp, Homo sapiens
tgctagagttacata

SEQ ID NO: 2114310 - DNA, 15 bp, Homo sapiens
gctagagttacataa

SEQ ID NO: 2114311 - DNA, 15 bp, Homo sapiens
ctagagttacataag

SEQ ID NO: 2114312 - DNA, 15 bp, Homo sapiens
tagagttacataaga

SEQ ID NO: 2114313 - DNA, 15 bp, Homo sapiens
agagttacataagat

SEQ ID NO: 2114314 - DNA, 15 bp, Homo sapiens
gagttacataagatt

SEQ ID NO: 2114315 - DNA, 15 bp, Homo sapiens
agttacataagattc

SEQ ID NO: 2114316 - DNA, 15 bp, Homo sapiens
gttacataagattca

SEQ ID NO: 2114317 - DNA, 15 bp, Homo sapiens
ttacataagattcaa

SEQ ID NO: 2114318 - DNA, 15 bp, Homo sapiens
tacataagattcaaa

SEQ ID NO: 2114319 - DNA, 15 bp, Homo sapiens
acataagattcaaat

SEQ ID NO: 2114320 - DNA, 15 bp, Homo sapiens
cataagattcaaatt

SEQ ID NO: 2114321 - DNA, 15 bp, Homo sapiens
ataagattcaaatta

SEQ ID NO: 2114322 - DNA, 15 bp, Homo sapiens
taagattcaaattaa

SEQ ID NO: 2114323 - DNA, 15 bp, Homo sapiens
aagattcaaattaat

SEQ ID NO: 2114324 - DNA, 15 bp, Homo sapiens
agattcaaattaata

SEQ ID NO: 2114325 - DNA, 15 bp, Homo sapiens
gattcaaattaataa

SEQ ID NO: 2114326 - DNA, 15 bp, Homo sapiens
attcaaattaataag

SEQ ID NO: 2114327 - DNA, 15 bp, Homo sapiens
ttcaaattaataagc

SEQ ID NO: 2114328 - DNA, 15 bp, Homo sapiens
tcaaattaataagca

SEQ ID NO: 2114329 - DNA, 15 bp, Homo sapiens
caaattaataagcaa

SEQ ID NO: 2114330 - DNA, 15 bp, Homo sapiens
aaattaataagcaat

SEQ ID NO: 2114331 - DNA, 15 bp, Homo sapiens
aattaataagcaata

SEQ ID NO: 2114332 - DNA, 15 bp, Homo sapiens
attaataagcaatag

SEQ ID NO: 2114333 - DNA, 15 bp, Homo sapiens
ttaataagcaataga

SEQ ID NO: 2114334 - DNA, 15 bp, Homo sapiens
taataagcaatagaa

SEQ ID NO: 2114335 - DNA, 15 bp, Homo sapiens
aataagcaatagaaa

SEQ ID NO: 2114336 - DNA, 15 bp, Homo sapiens
ataagcaatagaaaa

SEQ ID NO: 2114337 - DNA, 15 bp, Homo sapiens
taagcaatagaaaat

SEQ ID NO: 2114338 - DNA, 15 bp, Homo sapiens
aagcaatagaaaatg

SEQ ID NO: 2114339 - DNA, 15 bp, Homo sapiens
agcaatagaaaatgt

SEQ ID NO: 2114340 - DNA, 15 bp, Homo sapiens
gcaatagaaaatgtt

SEQ ID NO: 2114341 - DNA, 15 bp, Homo sapiens
caatagaaaatgttt

SEQ ID NO: 2114342 - DNA, 15 bp, Homo sapiens
aatagaaaatgtttc

SEQ ID NO: 2114343 - DNA, 15 bp, Homo sapiens
atagaaaatgtttcc

SEQ ID NO: 2114344 - DNA, 15 bp, Homo sapiens
tagaaaatgtttcca

SEQ ID NO: 2114345 - DNA, 15 bp, Homo sapiens
agaaaatgtttccac

SEQ ID NO: 2114346 - DNA, 15 bp, Homo sapiens
gaaaatgtttccaca

SEQ ID NO: 2114347 - DNA, 15 bp, Homo sapiens
aaaatgtttccacag

SEQ ID NO: 2114348 - DNA, 15 bp, Homo sapiens
aaatgtttccacaga

SEQ ID NO: 2114349 - DNA, 15 bp, Homo sapiens
aatgtttccacagaa

SEQ ID NO: 2114350 - DNA, 15 bp, Homo sapiens
atgtttccacagaac

SEQ ID NO: 2114351 - DNA, 15 bp, Homo sapiens
tgtttccacagaact

SEQ ID NO: 2114352 - DNA, 15 bp, Homo sapiens
gtttccacagaactt

SEQ ID NO: 2114353 - DNA, 15 bp, Homo sapiens
tttccacagaacttt

SEQ ID NO: 2114354 - DNA, 15 bp, Homo sapiens
ttccacagaactttg

SEQ ID NO: 2114355 - DNA, 15 bp, Homo sapiens
tccacagaactttga

SEQ ID NO: 2114356 - DNA, 15 bp, Homo sapiens
ccacagaactttgaa

SEQ ID NO: 2114357 - DNA, 15 bp, Homo sapiens
cacagaactttgaaa

SEQ ID NO: 2114358 - DNA, 15 bp, Homo sapiens
acagaactttgaaac

SEQ ID NO: 2114359 - DNA, 15 bp, Homo sapiens
cagaactttgaaacc

SEQ ID NO: 2114360 - DNA, 15 bp, Homo sapiens
agaactttgaaacct

SEQ ID NO: 2114361 - DNA, 15 bp, Homo sapiens
gaactttgaaaccta

SEQ ID NO: 2114362 - DNA, 15 bp, Homo sapiens
aactttgaaacctat

SEQ ID NO: 2114363 - DNA, 15 bp, Homo sapiens
actttgaaacctata

SEQ ID NO: 2114364 - DNA, 15 bp, Homo sapiens
ctttgaaacctataa

SEQ ID NO: 2114365 - DNA, 15 bp, Homo sapiens
tttgaaacctataaa

SEQ ID NO: 2114366 - DNA, 15 bp, Homo sapiens
ttgaaacctataaag

SEQ ID NO: 2114367 - DNA, 15 bp, Homo sapiens
tgaaacctataaagt

SEQ ID NO: 2114368 - DNA, 15 bp, Homo sapiens
gaaacctataaagtc

SEQ ID NO: 2114369 - DNA, 15 bp, Homo sapiens
aaacctataaagtca

SEQ ID NO: 2114370 - DNA, 15 bp, Homo sapiens
aacctataaagtcaa

SEQ ID NO: 2114371 - DNA, 15 bp, Homo sapiens
acctataaagtcaaa

SEQ ID NO: 2114372 - DNA, 15 bp, Homo sapiens
cctataaagtcaaaa

SEQ ID NO: 2114373 - DNA, 15 bp, Homo sapiens
ctataaagtcaaaac

SEQ ID NO: 2114374 - DNA, 15 bp, Homo sapiens
tataaagtcaaaact

SEQ ID NO: 2114375 - DNA, 15 bp, Homo sapiens
ataaagtcaaaactt

SEQ ID NO: 2114376 - DNA, 15 bp, Homo sapiens
taaagtcaaaacttt

SEQ ID NO: 2114377 - DNA, 15 bp, Homo sapiens
aaagtcaaaactttt

SEQ ID NO: 2114378 - DNA, 15 bp, Homo sapiens
aagtcaaaactttta

SEQ ID NO: 2114379 - DNA, 15 bp, Homo sapiens
agtcaaaacttttag

SEQ ID NO: 2114380 - DNA, 15 bp, Homo sapiens
gtcaaaacttttagg

SEQ ID NO: 2114381 - DNA, 15 bp, Homo sapiens
tcaaaacttttaggt

SEQ ID NO: 2114382 - DNA, 15 bp, Homo sapiens
caaaacttttaggtc

SEQ ID NO: 2114383 - DNA, 15 bp, Homo sapiens
aaaacttttaggtct

SEQ ID NO: 2114384 - DNA, 15 bp, Homo sapiens
aaacttttaggtctt

SEQ ID NO: 2114385 - DNA, 15 bp, Homo sapiens
aacttttaggtcttt

SEQ ID NO: 2114386 - DNA, 15 bp, Homo sapiens
acttttaggtcttta

SEQ ID NO: 2114387 - DNA, 15 bp, Homo sapiens
cttttaggtctttag

SEQ ID NO: 2114388 - DNA, 15 bp, Homo sapiens
ttttaggtctttaga

SEQ ID NO: 2114389 - DNA, 15 bp, Homo sapiens
tttaggtctttagag

SEQ ID NO: 2114390 - DNA, 15 bp, Homo sapiens
ttaggtctttagaga

SEQ ID NO: 2114391 - DNA, 15 bp, Homo sapiens
taggtctttagagag

SEQ ID NO: 2114392 - DNA, 15 bp, Homo sapiens
aggtctttagagaga

SEQ ID NO: 2114393 - DNA, 15 bp, Homo sapiens
ggtctttagagagaa

SEQ ID NO: 2114394 - DNA, 15 bp, Homo sapiens
gtctttagagagaaa

SEQ ID NO: 2114395 - DNA, 15 bp, Homo sapiens
tctttagagagaaaa

SEQ ID NO: 2114396 - DNA, 15 bp, Homo sapiens
ctttagagagaaaat

SEQ ID NO: 2114397 - DNA, 15 bp, Homo sapiens
tttagagagaaaatt

SEQ ID NO: 2114398 - DNA, 15 bp, Homo sapiens
ttagagagaaaattt

SEQ ID NO: 2114399 - DNA, 15 bp, Homo sapiens
tagagagaaaatttc

SEQ ID NO: 2114400 - DNA, 15 bp, Homo sapiens
agagagaaaatttcc

SEQ ID NO: 2114401 - DNA, 15 bp, Homo sapiens
gagagaaaatttcct

SEQ ID NO: 2114402 - DNA, 15 bp, Homo sapiens
agagaaaatttcctc

SEQ ID NO: 2114403 - DNA, 15 bp, Homo sapiens
gagaaaatttcctca

SEQ ID NO: 2114404 - DNA, 15 bp, Homo sapiens
agaaaatttcctcat

SEQ ID NO: 2114405 - DNA, 15 bp, Homo sapiens
gaaaatttcctcatt

SEQ ID NO: 2114406 - DNA, 15 bp, Homo sapiens
aaaatttcctcattc

SEQ ID NO: 2114407 - DNA, 15 bp, Homo sapiens
aaatttcctcattca

SEQ ID NO: 2114408 - DNA, 15 bp, Homo sapiens
aatttcctcattcaa

SEQ ID NO: 2114409 - DNA, 15 bp, Homo sapiens
atttcctcattcaac

SEQ ID NO: 2114410 - DNA, 15 bp, Homo sapiens
tttcctcattcaaca

SEQ ID NO: 2114411 - DNA, 15 bp, Homo sapiens
ttcctcattcaacag

SEQ ID NO: 2114412 - DNA, 15 bp, Homo sapiens
tcctcattcaacaga

SEQ ID NO: 2114413 - DNA, 15 bp, Homo sapiens
cctcattcaacagaa

SEQ ID NO: 2114414 - DNA, 15 bp, Homo sapiens
ctcattcaacagaat

SEQ ID NO: 2114415 - DNA, 15 bp, Homo sapiens
tcattcaacagaata

SEQ ID NO: 2114416 - DNA, 15 bp, Homo sapiens
cattcaacagaatag

SEQ ID NO: 2114417 - DNA, 15 bp, Homo sapiens
attcaacagaatagg

SEQ ID NO: 2114418 - DNA, 15 bp, Homo sapiens
ttcaacagaatagga

SEQ ID NO: 2114419 - DNA, 15 bp, Homo sapiens
tcaacagaataggaa

SEQ ID NO: 2114420 - DNA, 15 bp, Homo sapiens
caacagaataggaaa

SEQ ID NO: 2114421 - DNA, 15 bp, Homo sapiens
aacagaataggaaac

SEQ ID NO: 2114422 - DNA, 15 bp, Homo sapiens
acagaataggaaact

SEQ ID NO: 2114423 - DNA, 15 bp, Homo sapiens
cagaataggaaactg

SEQ ID NO: 2114424 - DNA, 15 bp, Homo sapiens
agaataggaaactgg

SEQ ID NO: 2114425 - DNA, 15 bp, Homo sapiens
gaataggaaactggc

SEQ ID NO: 2114426 - DNA, 15 bp, Homo sapiens
aataggaaactggca

SEQ ID NO: 2114427 - DNA, 15 bp, Homo sapiens
ataggaaactggcat

SEQ ID NO: 2114428 - DNA, 15 bp, Homo sapiens
taggaaactggcata

SEQ ID NO: 2114429 - DNA, 15 bp, Homo sapiens
aggaaactggcataa

SEQ ID NO: 2114430 - DNA, 15 bp, Homo sapiens
ggaaactggcataaa

SEQ ID NO: 2114431 - DNA, 15 bp, Homo sapiens
gaaactggcataaat

SEQ ID NO: 2114432 - DNA, 15 bp, Homo sapiens
aaactggcataaatg

SEQ ID NO: 2114433 - DNA, 15 bp, Homo sapiens
aactggcataaatgg

SEQ ID NO: 2114434 - DNA, 15 bp, Homo sapiens
actggcataaatggg

SEQ ID NO: 2114435 - DNA, 15 bp, Homo sapiens
ctggcataaatggga

SEQ ID NO: 2114436 - DNA, 15 bp, Homo sapiens
tggcataaatgggaa

SEQ ID NO: 2114437 - DNA, 15 bp, Homo sapiens
ggcataaatgggaaa

SEQ ID NO: 2114438 - DNA, 15 bp, Homo sapiens
gcataaatgggaaaa

SEQ ID NO: 2114439 - DNA, 15 bp, Homo sapiens
cataaatgggaaaat

SEQ ID NO: 2114440 - DNA, 15 bp, Homo sapiens
ataaatgggaaaatg

SEQ ID NO: 2114441 - DNA, 15 bp, Homo sapiens
taaatgggaaaatgt

SEQ ID NO: 2114442 - DNA, 15 bp, Homo sapiens
aaatgggaaaatgtc

SEQ ID NO: 2114443 - DNA, 15 bp, Homo sapiens
aatgggaaaatgtct

SEQ ID NO: 2114444 - DNA, 15 bp, Homo sapiens
atgggaaaatgtctt

SEQ ID NO: 2114445 - DNA, 15 bp, Homo sapiens
tgggaaaatgtcttg

SEQ ID NO: 2114446 - DNA, 15 bp, Homo sapiens
gggaaaatgtcttgc

SEQ ID NO: 2114447 - DNA, 15 bp, Homo sapiens
ggaaaatgtcttgcc

SEQ ID NO: 2114448 - DNA, 15 bp, Homo sapiens
gaaaatgtcttgcca

SEQ ID NO: 2114449 - DNA, 15 bp, Homo sapiens
aaaatgtcttgccaa

SEQ ID NO: 2114450 - DNA, 15 bp, Homo sapiens
aaatgtcttgccaaa

SEQ ID NO: 2114451 - DNA, 15 bp, Homo sapiens
aatgtcttgccaaat

SEQ ID NO: 2114452 - DNA, 15 bp, Homo sapiens
atgtcttgccaaata

SEQ ID NO: 2114453 - DNA, 15 bp, Homo sapiens
tgtcttgccaaatat

SEQ ID NO: 2114454 - DNA, 15 bp, Homo sapiens
gtcttgccaaatatc

SEQ ID NO: 2114455 - DNA, 15 bp, Homo sapiens
tcttgccaaatatca

SEQ ID NO: 2114456 - DNA, 15 bp, Homo sapiens
ttgccaaatatcact

SEQ ID NO: 2114457 - DNA, 15 bp, Homo sapiens
tgccaaatatcactt

SEQ ID NO: 2114458 - DNA, 15 bp, Homo sapiens
gccaaatatcacttg

SEQ ID NO: 2114459 - DNA, 15 bp, Homo sapiens
ccaaatatcacttga

SEQ ID NO: 2114460 - DNA, 15 bp, Homo sapiens
caaatatcacttgat

SEQ ID NO: 2114461 - DNA, 15 bp, Homo sapiens
aaatatcacttgatg

SEQ ID NO: 2114462 - DNA, 15 bp, Homo sapiens
aatatcacttgatga

SEQ ID NO: 2114463 - DNA, 15 bp, Homo sapiens
atatcacttgatgag

SEQ ID NO: 2114464 - DNA, 15 bp, Homo sapiens
tatcacttgatgagt

SEQ ID NO: 2114465 - DNA, 15 bp, Homo sapiens
atcacttgatgagtc

SEQ ID NO: 2114466 - DNA, 15 bp, Homo sapiens
tcacttgatgagtca

SEQ ID NO: 2114467 - DNA, 15 bp, Homo sapiens
cacttgatgagtcac

SEQ ID NO: 2114468 - DNA, 15 bp, Homo sapiens
acttgatgagtcact

SEQ ID NO: 2114469 - DNA, 15 bp, Homo sapiens
cttgatgagtcacta

SEQ ID NO: 2114470 - DNA, 15 bp, Homo sapiens
ttgatgagtcactag

SEQ ID NO: 2114471 - DNA, 15 bp, Homo sapiens
tgatgagtcactaga

SEQ ID NO: 2114472 - DNA, 15 bp, Homo sapiens
gatgagtcactagag

SEQ ID NO: 2114473 - DNA, 15 bp, Homo sapiens
atgagtcactagaga

SEQ ID NO: 2114474 - DNA, 15 bp, Homo sapiens
tgagtcactagagac

SEQ ID NO: 2114475 - DNA, 15 bp, Homo sapiens
gagtcactagagaca

SEQ ID NO: 2114476 - DNA, 15 bp, Homo sapiens
agtcactagagacac

SEQ ID NO: 2114477 - DNA, 15 bp, Homo sapiens
gtcactagagacacc

SEQ ID NO: 2114478 - DNA, 15 bp, Homo sapiens
tcactagagacacca

SEQ ID NO: 2114479 - DNA, 15 bp, Homo sapiens
cactagagacaccac

SEQ ID NO: 2114480 - DNA, 15 bp, Homo sapiens
actagagacaccact

SEQ ID NO: 2114481 - DNA, 15 bp, Homo sapiens
ctagagacaccacta

SEQ ID NO: 2114482 - DNA, 15 bp, Homo sapiens
tagagacaccactac

SEQ ID NO: 2114483 - DNA, 15 bp, Homo sapiens
agagacaccactacc

SEQ ID NO: 2114484 - DNA, 15 bp, Homo sapiens
gagacaccactacca

SEQ ID NO: 2114485 - DNA, 15 bp, Homo sapiens
agacaccactaccag

SEQ ID NO: 2114486 - DNA, 15 bp, Homo sapiens
gacaccactaccagt

SEQ ID NO: 2114487 - DNA, 15 bp, Homo sapiens
acaccactaccagtc

SEQ ID NO: 2114488 - DNA, 15 bp, Homo sapiens
caccactaccagtca

SEQ ID NO: 2114489 - DNA, 15 bp, Homo sapiens
accactaccagtcat

SEQ ID NO: 2114490 - DNA, 15 bp, Homo sapiens
ccactaccagtcata

SEQ ID NO: 2114491 - DNA, 15 bp, Homo sapiens
cactaccagtcatag

SEQ ID NO: 2114492 - DNA, 15 bp, Homo sapiens
actaccagtcatagc

SEQ ID NO: 2114493 - DNA, 15 bp, Homo sapiens
ctaccagtcatagcc

SEQ ID NO: 2114494 - DNA, 15 bp, Homo sapiens
taccagtcatagcct

SEQ ID NO: 2114495 - DNA, 15 bp, Homo sapiens
accagtcatagcctt

SEQ ID NO: 2114496 - DNA, 15 bp, Homo sapiens
ccagtcatagcctta

SEQ ID NO: 2114497 - DNA, 15 bp, Homo sapiens
cagtcatagccttat

SEQ ID NO: 2114498 - DNA, 15 bp, Homo sapiens
agtcatagccttata

SEQ ID NO: 2114499 - DNA, 15 bp, Homo sapiens
gtcatagccttatac

SEQ ID NO: 2114500 - DNA, 15 bp, Homo sapiens
tcatagccttatacc

SEQ ID NO: 2114501 - DNA, 15 bp, Homo sapiens
catagccttatacct

SEQ ID NO: 2114502 - DNA, 15 bp, Homo sapiens
atagccttatacctt

SEQ ID NO: 2114503 - DNA, 15 bp, Homo sapiens
tagccttatacctta

SEQ ID NO: 2114504 - DNA, 15 bp, Homo sapiens
gccttataccttagt

SEQ ID NO: 2114505 - DNA, 15 bp, Homo sapiens
ccttataccttagtt

SEQ ID NO: 2114506 - DNA, 15 bp, Homo sapiens
cttataccttagtta

SEQ ID NO: 2114507 - DNA, 15 bp, Homo sapiens
ttataccttagttaa

SEQ ID NO: 2114508 - DNA, 15 bp, Homo sapiens
tataccttagttaaa

SEQ ID NO: 2114509 - DNA, 15 bp, Homo sapiens
ataccttagttaaag

SEQ ID NO: 2114510 - DNA, 15 bp, Homo sapiens
taccttagttaaaga

SEQ ID NO: 2114511 - DNA, 15 bp, Homo sapiens
accttagttaaagac

SEQ ID NO: 2114512 - DNA, 15 bp, Homo sapiens
ccttagttaaagacc

SEQ ID NO: 2114513 - DNA, 15 bp, Homo sapiens
cttagttaaagacca

SEQ ID NO: 2114514 - DNA, 15 bp, Homo sapiens
ttagttaaagaccag

SEQ ID NO: 2114515 - DNA, 15 bp, Homo sapiens
tagttaaagaccaga

SEQ ID NO: 2114516 - DNA, 15 bp, Homo sapiens
agttaaagaccagaa

SEQ ID NO: 2114517 - DNA, 15 bp, Homo sapiens
gttaaagaccagaac

SEQ ID NO: 2114518 - DNA, 15 bp, Homo sapiens
ttaaagaccagaact

SEQ ID NO: 2114519 - DNA, 15 bp, Homo sapiens
taaagaccagaactg

SEQ ID NO: 2114520 - DNA, 15 bp, Homo sapiens
aaagaccagaactgc

SEQ ID NO: 2114521 - DNA, 15 bp, Homo sapiens
aagaccagaactgcc

SEQ ID NO: 2114522 - DNA, 15 bp, Homo sapiens
agaccagaactgccg

SEQ ID NO: 2114523 - DNA, 15 bp, Homo sapiens
gaccagaactgccgg

SEQ ID NO: 2114524 - DNA, 15 bp, Homo sapiens
accagaactgccggg

SEQ ID NO: 2114525 - DNA, 15 bp, Homo sapiens
ccagaactgccgggc

SEQ ID NO: 2114526 - DNA, 15 bp, Homo sapiens
cagaactgccgggcg

SEQ ID NO: 2114527 - DNA, 15 bp, Homo sapiens
agaactgccgggcgc

SEQ ID NO: 2114528 - DNA, 15 bp, Homo sapiens
gaactgccgggcgcg

SEQ ID NO: 2114529 - DNA, 15 bp, Homo sapiens
aactgccgggcgcgg

SEQ ID NO: 2114530 - DNA, 15 bp, Homo sapiens
actgccgggcgcggt

SEQ ID NO: 2114531 - DNA, 15 bp, Homo sapiens
ctgccgggcgcggtg

SEQ ID NO: 2114532 - DNA, 15 bp, Homo sapiens
tgccgggcgcggtgg

SEQ ID NO: 2114533 - DNA, 15 bp, Homo sapiens
cggtggctcacgccc

SEQ ID NO: 2114534 - DNA, 15 bp, Homo sapiens
ggtggctcacgccca

SEQ ID NO: 2114535 - DNA, 15 bp, Homo sapiens
gtggctcacgcccat

SEQ ID NO: 2114536 - DNA, 15 bp, Homo sapiens
tggctcacgcccata

SEQ ID NO: 2114537 - DNA, 15 bp, Homo sapiens
ggctcacgcccataa

SEQ ID NO: 2114538 - DNA, 15 bp, Homo sapiens
gctcacgcccataat

SEQ ID NO: 2114539 - DNA, 15 bp, Homo sapiens
ctcacgcccataatc

SEQ ID NO: 2114540 - DNA, 15 bp, Homo sapiens
tcacgcccataatcc

SEQ ID NO: 2114541 - DNA, 15 bp, Homo sapiens
cacgcccataatccc

SEQ ID NO: 2114542 - DNA, 15 bp, Homo sapiens
acgcccataatccca

SEQ ID NO: 2114543 - DNA, 15 bp, Homo sapiens
cgcccataatcccag

SEQ ID NO: 2114544 - DNA, 15 bp, Homo sapiens
gcccataatcccagc

SEQ ID NO: 2114545 - DNA, 15 bp, Homo sapiens
gcactttgggaggtt

SEQ ID NO: 2114546 - DNA, 15 bp, Homo sapiens
gaggttgaggtgggc

SEQ ID NO: 2114547 - DNA, 15 bp, Homo sapiens
aggttgaggtgggcg

SEQ ID NO: 2114548 - DNA, 15 bp, Homo sapiens
ggttgaggtgggcgg

SEQ ID NO: 2114549 - DNA, 15 bp, Homo sapiens
gttgaggtgggcgga

SEQ ID NO: 2114550 - DNA, 15 bp, Homo sapiens
ttgaggtgggcggat

SEQ ID NO: 2114551 - DNA, 15 bp, Homo sapiens
caacatggagaaaca

SEQ ID NO: 2114552 - DNA, 15 bp, Homo sapiens
aacatggagaaacac

SEQ ID NO: 2114553 - DNA, 15 bp, Homo sapiens
acatggagaaacacc

SEQ ID NO: 2114554 - DNA, 15 bp, Homo sapiens
catggagaaacaccg

SEQ ID NO: 2114555 - DNA, 15 bp, Homo sapiens
atggagaaacaccgt

SEQ ID NO: 2114556 - DNA, 15 bp, Homo sapiens
tggagaaacaccgtc

SEQ ID NO: 2114557 - DNA, 15 bp, Homo sapiens
ggagaaacaccgtct

SEQ ID NO: 2114558 - DNA, 15 bp, Homo sapiens
gagaaacaccgtctc

SEQ ID NO: 2114559 - DNA, 15 bp, Homo sapiens
agaaacaccgtctct

SEQ ID NO: 2114560 - DNA, 15 bp, Homo sapiens
gaaacaccgtctcta

SEQ ID NO: 2114561 - DNA, 15 bp, Homo sapiens
aaacaccgtctctat

SEQ ID NO: 2114562 - DNA, 15 bp, Homo sapiens
aacaccgtctctatt

SEQ ID NO: 2114563 - DNA, 15 bp, Homo sapiens
acaccgtctctatta

SEQ ID NO: 2114564 - DNA, 15 bp, Homo sapiens
caccgtctctattaa

SEQ ID NO: 2114565 - DNA, 15 bp, Homo sapiens
accgtctctattaaa

SEQ ID NO: 2114566 - DNA, 15 bp, Homo sapiens
ccgtctctattaaaa

SEQ ID NO: 2114567 - DNA, 15 bp, Homo sapiens
cgtctctattaaaaa

SEQ ID NO: 2114568 - DNA, 15 bp, Homo sapiens
gtctctattaaaaat

SEQ ID NO: 2114569 - DNA, 15 bp, Homo sapiens
tctctattaaaaata

SEQ ID NO: 2114570 - DNA, 15 bp, Homo sapiens
ctctattaaaaatac

SEQ ID NO: 2114571 - DNA, 15 bp, Homo sapiens
tctattaaaaataca

SEQ ID NO: 2114572 - DNA, 15 bp, Homo sapiens
ctattaaaaatacaa

SEQ ID NO: 2114573 - DNA, 15 bp, Homo sapiens
tattaaaaatacaaa

SEQ ID NO: 2114574 - DNA, 15 bp, Homo sapiens
ttaaaaatacaaaat

SEQ ID NO: 2114575 - DNA, 15 bp, Homo sapiens
cgggcgtggtggtgc

SEQ ID NO: 2114576 - DNA, 15 bp, Homo sapiens
ggcgtggtggtgcat

SEQ ID NO: 2114577 - DNA, 15 bp, Homo sapiens
cccgggaggcagagg

SEQ ID NO: 2114578 - DNA, 15 bp, Homo sapiens
ccgggaggcagaggt

SEQ ID NO: 2114579 - DNA, 15 bp, Homo sapiens
ctgagattgcaccat

SEQ ID NO: 2114580 - DNA, 15 bp, Homo sapiens
tgggcaacaagagca

SEQ ID NO: 2114581 - DNA, 15 bp, Homo sapiens
gggcaacaagagcaa

SEQ ID NO: 2114582 - DNA, 15 bp, Homo sapiens
ggcaacaagagcaaa

SEQ ID NO: 2114583 - DNA, 15 bp, Homo sapiens
gcaacaagagcaaaa

SEQ ID NO: 2114584 - DNA, 15 bp, Homo sapiens
caacaagagcaaaac

SEQ ID NO: 2114585 - DNA, 15 bp, Homo sapiens
aacaagagcaaaact

SEQ ID NO: 2114586 - DNA, 15 bp, Homo sapiens
acaagagcaaaactc

SEQ ID NO: 2114587 - DNA, 15 bp, Homo sapiens
aaaaaaaaaaagact

SEQ ID NO: 2114588 - DNA, 15 bp, Homo sapiens
aaaaaaaaaagactt

SEQ ID NO: 2114589 - DNA, 15 bp, Homo sapiens
aaaaaaaaagacttc

SEQ ID NO: 2114590 - DNA, 15 bp, Homo sapiens
aaaaaaaagacttcc

SEQ ID NO: 2114591 - DNA, 15 bp, Homo sapiens
aaaaaaagacttcca

SEQ ID NO: 2114592 - DNA, 15 bp, Homo sapiens
aaaaaagacttccat

SEQ ID NO: 2114593 - DNA, 15 bp, Homo sapiens
aaaaagacttccatc

SEQ ID NO: 2114594 - DNA, 15 bp, Homo sapiens
aaaagacttccatcc

SEQ ID NO: 2114595 - DNA, 15 bp, Homo sapiens
aaagacttccatcct

SEQ ID NO: 2114596 - DNA, 15 bp, Homo sapiens
aagacttccatcctg

SEQ ID NO: 2114597 - DNA, 15 bp, Homo sapiens
agacttccatcctgt

SEQ ID NO: 2114598 - DNA, 15 bp, Homo sapiens
gacttccatcctgtt

SEQ ID NO: 2114599 - DNA, 15 bp, Homo sapiens
acttccatcctgttt

SEQ ID NO: 2114600 - DNA, 15 bp, Homo sapiens
cttccatcctgtttt

SEQ ID NO: 2114601 - DNA, 15 bp, Homo sapiens
ttccatcctgtttta

SEQ ID NO: 2114602 - DNA, 15 bp, Homo sapiens
tccatcctgttttaa

SEQ ID NO: 2114603 - DNA, 15 bp, Homo sapiens
ccatcctgttttaag

SEQ ID NO: 2114604 - DNA, 15 bp, Homo sapiens
catcctgttttaagt

SEQ ID NO: 2114605 - DNA, 15 bp, Homo sapiens
atcctgttttaagtg

SEQ ID NO: 2114606 - DNA, 15 bp, Homo sapiens
tcctgttttaagtgc

SEQ ID NO: 2114607 - DNA, 15 bp, Homo sapiens
cctgttttaagtgcc

SEQ ID NO: 2114608 - DNA, 15 bp, Homo sapiens
ctgttttaagtgcca

SEQ ID NO: 2114609 - DNA, 15 bp, Homo sapiens
tgttttaagtgccaa

SEQ ID NO: 2114610 - DNA, 15 bp, Homo sapiens
gttttaagtgccaat

SEQ ID NO: 2114611 - DNA, 15 bp, Homo sapiens
ttttaagtgccaatc

SEQ ID NO: 2114612 - DNA, 15 bp, Homo sapiens
tttaagtgccaatca

SEQ ID NO: 2114613 - DNA, 15 bp, Homo sapiens
ttaagtgccaatcag

SEQ ID NO: 2114614 - DNA, 15 bp, Homo sapiens
taagtgccaatcagc

SEQ ID NO: 2114615 - DNA, 15 bp, Homo sapiens
aagtgccaatcagct

SEQ ID NO: 2114616 - DNA, 15 bp, Homo sapiens
agtgccaatcagcta

SEQ ID NO: 2114617 - DNA, 15 bp, Homo sapiens
gtgccaatcagctag

SEQ ID NO: 2114618 - DNA, 15 bp, Homo sapiens
tgccaatcagctagg

SEQ ID NO: 2114619 - DNA, 15 bp, Homo sapiens
gccaatcagctagga

SEQ ID NO: 2114620 - DNA, 15 bp, Homo sapiens
ccaatcagctaggaa

SEQ ID NO: 2114621 - DNA, 15 bp, Homo sapiens
caatcagctaggaaa

SEQ ID NO: 2114622 - DNA, 15 bp, Homo sapiens
aatcagctaggaaag

SEQ ID NO: 2114623 - DNA, 15 bp, Homo sapiens
atcagctaggaaaga

SEQ ID NO: 2114624 - DNA, 15 bp, Homo sapiens
tcagctaggaaagag

SEQ ID NO: 2114625 - DNA, 15 bp, Homo sapiens
cagctaggaaagagt

SEQ ID NO: 2114626 - DNA, 15 bp, Homo sapiens
agctaggaaagagtc

SEQ ID NO: 2114627 - DNA, 15 bp, Homo sapiens
gctaggaaagagtcc

SEQ ID NO: 2114628 - DNA, 15 bp, Homo sapiens
ctaggaaagagtccc

SEQ ID NO: 2114629 - DNA, 15 bp, Homo sapiens
taggaaagagtccct

SEQ ID NO: 2114630 - DNA, 15 bp, Homo sapiens
aggaaagagtccctt

SEQ ID NO: 2114631 - DNA, 15 bp, Homo sapiens
ggaaagagtcccttt

SEQ ID NO: 2114632 - DNA, 15 bp, Homo sapiens
gaaagagtcccttta

SEQ ID NO: 2114633 - DNA, 15 bp, Homo sapiens
aaagagtccctttaa

SEQ ID NO: 2114634 - DNA, 15 bp, Homo sapiens
aagagtccctttaaa

SEQ ID NO: 2114635 - DNA, 15 bp, Homo sapiens
agagtccctttaaat

SEQ ID NO: 2114636 - DNA, 15 bp, Homo sapiens
gagtccctttaaatg

SEQ ID NO: 2114637 - DNA, 15 bp, Homo sapiens
agtccctttaaatga

SEQ ID NO: 2114638 - DNA, 15 bp, Homo sapiens
gtccctttaaatgat

SEQ ID NO: 2114639 - DNA, 15 bp, Homo sapiens
tccctttaaatgatt

SEQ ID NO: 2114640 - DNA, 15 bp, Homo sapiens
ccctttaaatgatta

SEQ ID NO: 2114641 - DNA, 15 bp, Homo sapiens
cctttaaatgattaa

SEQ ID NO: 2114642 - DNA, 15 bp, Homo sapiens
ctttaaatgattaat

SEQ ID NO: 2114643 - DNA, 15 bp, Homo sapiens
tttaaatgattaata

SEQ ID NO: 2114644 - DNA, 15 bp, Homo sapiens
ttaaatgattaataa

SEQ ID NO: 2114645 - DNA, 15 bp, Homo sapiens
taaatgattaataac

SEQ ID NO: 2114646 - DNA, 15 bp, Homo sapiens
aaatgattaataact

SEQ ID NO: 2114647 - DNA, 15 bp, Homo sapiens
aatgattaataactg

SEQ ID NO: 2114648 - DNA, 15 bp, Homo sapiens
atgattaataactga

SEQ ID NO: 2114649 - DNA, 15 bp, Homo sapiens
tgattaataactgag

SEQ ID NO: 2114650 - DNA, 15 bp, Homo sapiens
gattaataactgaga

SEQ ID NO: 2114651 - DNA, 15 bp, Homo sapiens
attaataactgagat

SEQ ID NO: 2114652 - DNA, 15 bp, Homo sapiens
ttaataactgagatc

SEQ ID NO: 2114653 - DNA, 15 bp, Homo sapiens
taataactgagatca

SEQ ID NO: 2114654 - DNA, 15 bp, Homo sapiens
aataactgagatcac

SEQ ID NO: 2114655 - DNA, 15 bp, Homo sapiens
ataactgagatcaca

SEQ ID NO: 2114656 - DNA, 15 bp, Homo sapiens
taactgagatcacaa

SEQ ID NO: 2114657 - DNA, 15 bp, Homo sapiens
aactgagatcacaaa

SEQ ID NO: 2114658 - DNA, 15 bp, Homo sapiens
actgagatcacaaaa

SEQ ID NO: 2114659 - DNA, 15 bp, Homo sapiens
ctgagatcacaaaaa

SEQ ID NO: 2114660 - DNA, 15 bp, Homo sapiens
tgagatcacaaaaat

SEQ ID NO: 2114661 - DNA, 15 bp, Homo sapiens
gagatcacaaaaata

SEQ ID NO: 2114662 - DNA, 15 bp, Homo sapiens
agatcacaaaaataa

SEQ ID NO: 2114663 - DNA, 15 bp, Homo sapiens
gatcacaaaaataat

SEQ ID NO: 2114664 - DNA, 15 bp, Homo sapiens
atcacaaaaataata

SEQ ID NO: 2114665 - DNA, 15 bp, Homo sapiens
tcacaaaaataatag

SEQ ID NO: 2114666 - DNA, 15 bp, Homo sapiens
cacaaaaataataga

SEQ ID NO: 2114667 - DNA, 15 bp, Homo sapiens
acaaaaataatagat

SEQ ID NO: 2114668 - DNA, 15 bp, Homo sapiens
caaaaataatagata

SEQ ID NO: 2114669 - DNA, 15 bp, Homo sapiens
aaaaataatagatat

SEQ ID NO: 2114670 - DNA, 15 bp, Homo sapiens
aaaataatagatatg

SEQ ID NO: 2114671 - DNA, 15 bp, Homo sapiens
aaataatagatatga

SEQ ID NO: 2114672 - DNA, 15 bp, Homo sapiens
aataatagatatgag

SEQ ID NO: 2114673 - DNA, 15 bp, Homo sapiens
ataatagatatgaga

SEQ ID NO: 2114674 - DNA, 15 bp, Homo sapiens
taatagatatgagag

SEQ ID NO: 2114675 - DNA, 15 bp, Homo sapiens
aatagatatgagagg

SEQ ID NO: 2114676 - DNA, 15 bp, Homo sapiens
atagatatgagaggg

SEQ ID NO: 2114677 - DNA, 15 bp, Homo sapiens
tagatatgagaggga

SEQ ID NO: 2114678 - DNA, 15 bp, Homo sapiens
agatatgagagggaa

SEQ ID NO: 2114679 - DNA, 15 bp, Homo sapiens
gatatgagagggaaa

SEQ ID NO: 2114680 - DNA, 15 bp, Homo sapiens
atatgagagggaaaa

SEQ ID NO: 2114681 - DNA, 15 bp, Homo sapiens
tatgagagggaaaaa

SEQ ID NO: 2114682 - DNA, 15 bp, Homo sapiens
atgagagggaaaaac

SEQ ID NO: 2114683 - DNA, 15 bp, Homo sapiens
tgagagggaaaaaca

SEQ ID NO: 2114684 - DNA, 15 bp, Homo sapiens
gagagggaaaaacat

SEQ ID NO: 2114685 - DNA, 15 bp, Homo sapiens
agagggaaaaacata

SEQ ID NO: 2114686 - DNA, 15 bp, Homo sapiens
gagggaaaaacataa

SEQ ID NO: 2114687 - DNA, 15 bp, Homo sapiens
agggaaaaacataag

SEQ ID NO: 2114688 - DNA, 15 bp, Homo sapiens
gggaaaaacataagg

SEQ ID NO: 2114689 - DNA, 15 bp, Homo sapiens
ggaaaaacataaggt

SEQ ID NO: 2114690 - DNA, 15 bp, Homo sapiens
gaaaaacataaggtc

SEQ ID NO: 2114691 - DNA, 15 bp, Homo sapiens
aaaaacataaggtct

SEQ ID NO: 2114692 - DNA, 15 bp, Homo sapiens
aaaacataaggtctt

SEQ ID NO: 2114693 - DNA, 15 bp, Homo sapiens
aaacataaggtcttc

SEQ ID NO: 2114694 - DNA, 15 bp, Homo sapiens
aacataaggtcttcc

SEQ ID NO: 2114695 - DNA, 15 bp, Homo sapiens
acataaggtcttccc

SEQ ID NO: 2114696 - DNA, 15 bp, Homo sapiens
cataaggtcttccca

SEQ ID NO: 2114697 - DNA, 15 bp, Homo sapiens
ataaggtcttcccaa

SEQ ID NO: 2114698 - DNA, 15 bp, Homo sapiens
taaggtcttcccaat

SEQ ID NO: 2114699 - DNA, 15 bp, Homo sapiens
aaggtcttcccaatg

SEQ ID NO: 2114700 - DNA, 15 bp, Homo sapiens
aggtcttcccaatgt

SEQ ID NO: 2114701 - DNA, 15 bp, Homo sapiens
ggtcttcccaatgtt

SEQ ID NO: 2114702 - DNA, 15 bp, Homo sapiens
gtcttcccaatgttt

SEQ ID NO: 2114703 - DNA, 15 bp, Homo sapiens
tcttcccaatgttta

SEQ ID NO: 2114704 - DNA, 15 bp, Homo sapiens
cttcccaatgtttaa

SEQ ID NO: 2114705 - DNA, 15 bp, Homo sapiens
ttcccaatgtttaag

SEQ ID NO: 2114706 - DNA, 15 bp, Homo sapiens
tcccaatgtttaagg

SEQ ID NO: 2114707 - DNA, 15 bp, Homo sapiens
cccaatgtttaaggc

SEQ ID NO: 2114708 - DNA, 15 bp, Homo sapiens
ccaatgtttaaggct

SEQ ID NO: 2114709 - DNA, 15 bp, Homo sapiens
caatgtttaaggctc

SEQ ID NO: 2114710 - DNA, 15 bp, Homo sapiens
aatgtttaaggctca

SEQ ID NO: 2114711 - DNA, 15 bp, Homo sapiens
atgtttaaggctcac

SEQ ID NO: 2114712 - DNA, 15 bp, Homo sapiens
tgtttaaggctcact

SEQ ID NO: 2114713 - DNA, 15 bp, Homo sapiens
gtttaaggctcactt

SEQ ID NO: 2114714 - DNA, 15 bp, Homo sapiens
tttaaggctcacttc

SEQ ID NO: 2114715 - DNA, 15 bp, Homo sapiens
ttaaggctcacttcg

SEQ ID NO: 2114716 - DNA, 15 bp, Homo sapiens
taaggctcacttcga

SEQ ID NO: 2114717 - DNA, 15 bp, Homo sapiens
aaggctcacttcgat

SEQ ID NO: 2114718 - DNA, 15 bp, Homo sapiens
aggctcacttcgatg

SEQ ID NO: 2114719 - DNA, 15 bp, Homo sapiens
ggctcacttcgatgt

SEQ ID NO: 2114720 - DNA, 15 bp, Homo sapiens
gctcacttcgatgtt

SEQ ID NO: 2114721 - DNA, 15 bp, Homo sapiens
ctcacttcgatgttt

SEQ ID NO: 2114722 - DNA, 15 bp, Homo sapiens
tcacttcgatgtttt

SEQ ID NO: 2114723 - DNA, 15 bp, Homo sapiens
cacttcgatgtttta

SEQ ID NO: 2114724 - DNA, 15 bp, Homo sapiens
acttcgatgttttaa

SEQ ID NO: 2114725 - DNA, 15 bp, Homo sapiens
cttcgatgttttaag

SEQ ID NO: 2114726 - DNA, 15 bp, Homo sapiens
ttcgatgttttaaga

SEQ ID NO: 2114727 - DNA, 15 bp, Homo sapiens
tcgatgttttaagac

SEQ ID NO: 2114728 - DNA, 15 bp, Homo sapiens
cgatgttttaagacc

SEQ ID NO: 2114729 - DNA, 15 bp, Homo sapiens
gatgttttaagaccc

SEQ ID NO: 2114730 - DNA, 15 bp, Homo sapiens
atgttttaagacccc

SEQ ID NO: 2114731 - DNA, 15 bp, Homo sapiens
tgttttaagacccct

SEQ ID NO: 2114732 - DNA, 15 bp, Homo sapiens
gttttaagacccctc

SEQ ID NO: 2114733 - DNA, 15 bp, Homo sapiens
ttttaagacccctca

SEQ ID NO: 2114734 - DNA, 15 bp, Homo sapiens
tttaagacccctcaa

SEQ ID NO: 2114735 - DNA, 15 bp, Homo sapiens
ttaagacccctcaag

SEQ ID NO: 2114736 - DNA, 15 bp, Homo sapiens
taagacccctcaagt

SEQ ID NO: 2114737 - DNA, 15 bp, Homo sapiens
aagacccctcaagtt

SEQ ID NO: 2114738 - DNA, 15 bp, Homo sapiens
agacccctcaagttt

SEQ ID NO: 2114739 - DNA, 15 bp, Homo sapiens
gacccctcaagtttg

SEQ ID NO: 2114740 - DNA, 15 bp, Homo sapiens
acccctcaagtttgc

SEQ ID NO: 2114741 - DNA, 15 bp, Homo sapiens
cccctcaagtttgct

SEQ ID NO: 2114742 - DNA, 15 bp, Homo sapiens
ccctcaagtttgctt

SEQ ID NO: 2114743 - DNA, 15 bp, Homo sapiens
cctcaagtttgcttt

SEQ ID NO: 2114744 - DNA, 15 bp, Homo sapiens
ctcaagtttgcttta

SEQ ID NO: 2114745 - DNA, 15 bp, Homo sapiens
tcaagtttgctttaa

SEQ ID NO: 2114746 - DNA, 15 bp, Homo sapiens
caagtttgctttaag

SEQ ID NO: 2114747 - DNA, 15 bp, Homo sapiens
aagtttgctttaagt

SEQ ID NO: 2114748 - DNA, 15 bp, Homo sapiens
agtttgctttaagtc

SEQ ID NO: 2114749 - DNA, 15 bp, Homo sapiens
gtttgctttaagtct

SEQ ID NO: 2114750 - DNA, 15 bp, Homo sapiens
tttgctttaagtctc

SEQ ID NO: 2114751 - DNA, 15 bp, Homo sapiens
ttgctttaagtctcc

SEQ ID NO: 2114752 - DNA, 15 bp, Homo sapiens
tgctttaagtctcct

SEQ ID NO: 2114753 - DNA, 15 bp, Homo sapiens
gctttaagtctcctg

SEQ ID NO: 2114754 - DNA, 15 bp, Homo sapiens
ctttaagtctcctgg

SEQ ID NO: 2114755 - DNA, 15 bp, Homo sapiens
tttaagtctcctggc

SEQ ID NO: 2114756 - DNA, 15 bp, Homo sapiens
ttaagtctcctggct

SEQ ID NO: 2114757 - DNA, 15 bp, Homo sapiens
taagtctcctggctc

SEQ ID NO: 2114758 - DNA, 15 bp, Homo sapiens
aagtctcctggctca

SEQ ID NO: 2114759 - DNA, 15 bp, Homo sapiens
agtctcctggctcag

SEQ ID NO: 2114760 - DNA, 15 bp, Homo sapiens
gtctcctggctcagg

SEQ ID NO: 2114761 - DNA, 15 bp, Homo sapiens
tctcctggctcagga

SEQ ID NO: 2114762 - DNA, 15 bp, Homo sapiens
ctcctggctcaggac

SEQ ID NO: 2114763 - DNA, 15 bp, Homo sapiens
tcctggctcaggact

SEQ ID NO: 2114764 - DNA, 15 bp, Homo sapiens
cctggctcaggacta

SEQ ID NO: 2114765 - DNA, 15 bp, Homo sapiens
ctggctcaggactaa

SEQ ID NO: 2114766 - DNA, 15 bp, Homo sapiens
tggctcaggactaac

SEQ ID NO: 2114767 - DNA, 15 bp, Homo sapiens
ggctcaggactaaca

SEQ ID NO: 2114768 - DNA, 15 bp, Homo sapiens
gctcaggactaacaa

SEQ ID NO: 2114769 - DNA, 15 bp, Homo sapiens
ctcaggactaacaaa

SEQ ID NO: 2114770 - DNA, 15 bp, Homo sapiens
tcaggactaacaaaa

SEQ ID NO: 2114771 - DNA, 15 bp, Homo sapiens
caggactaacaaaac

SEQ ID NO: 2114772 - DNA, 15 bp, Homo sapiens
aggactaacaaaaca

SEQ ID NO: 2114773 - DNA, 15 bp, Homo sapiens
ggactaacaaaacac

SEQ ID NO: 2114774 - DNA, 15 bp, Homo sapiens
gactaacaaaacaca

SEQ ID NO: 2114775 - DNA, 15 bp, Homo sapiens
actaacaaaacacag

SEQ ID NO: 2114776 - DNA, 15 bp, Homo sapiens
ctaacaaaacacagc

SEQ ID NO: 2114777 - DNA, 15 bp, Homo sapiens
taacaaaacacagcc

SEQ ID NO: 2114778 - DNA, 15 bp, Homo sapiens
aacaaaacacagcct

SEQ ID NO: 2114779 - DNA, 15 bp, Homo sapiens
acaaaacacagcctt

SEQ ID NO: 2114780 - DNA, 15 bp, Homo sapiens
caaaacacagcctta

SEQ ID NO: 2114781 - DNA, 15 bp, Homo sapiens
aaaacacagccttag

SEQ ID NO: 2114782 - DNA, 15 bp, Homo sapiens
aaacacagccttaga

SEQ ID NO: 2114783 - DNA, 15 bp, Homo sapiens
aacacagccttagag

SEQ ID NO: 2114784 - DNA, 15 bp, Homo sapiens
acacagccttagagc

SEQ ID NO: 2114785 - DNA, 15 bp, Homo sapiens
cacagccttagagca

SEQ ID NO: 2114786 - DNA, 15 bp, Homo sapiens
acagccttagagcag

SEQ ID NO: 2114787 - DNA, 15 bp, Homo sapiens
cagccttagagcagc

SEQ ID NO: 2114788 - DNA, 15 bp, Homo sapiens
agccttagagcagca

SEQ ID NO: 2114789 - DNA, 15 bp, Homo sapiens
gccttagagcagcat

SEQ ID NO: 2114790 - DNA, 15 bp, Homo sapiens
ccttagagcagcatt

SEQ ID NO: 2114791 - DNA, 15 bp, Homo sapiens
cttagagcagcattt

SEQ ID NO: 2114792 - DNA, 15 bp, Homo sapiens
ttagagcagcatttt

SEQ ID NO: 2114793 - DNA, 15 bp, Homo sapiens
tagagcagcattttc

SEQ ID NO: 2114794 - DNA, 15 bp, Homo sapiens
agagcagcattttca

SEQ ID NO: 2114795 - DNA, 15 bp, Homo sapiens
gagcagcattttcaa

SEQ ID NO: 2114796 - DNA, 15 bp, Homo sapiens
agcagcattttcaaa

SEQ ID NO: 2114797 - DNA, 15 bp, Homo sapiens
gcagcattttcaaaa

SEQ ID NO: 2114798 - DNA, 15 bp, Homo sapiens
cagcattttcaaaac

SEQ ID NO: 2114799 - DNA, 15 bp, Homo sapiens
agcattttcaaaact

SEQ ID NO: 2114800 - DNA, 15 bp, Homo sapiens
gcattttcaaaactc

SEQ ID NO: 2114801 - DNA, 15 bp, Homo sapiens
cattttcaaaactca

SEQ ID NO: 2114802 - DNA, 15 bp, Homo sapiens
attttcaaaactcac

SEQ ID NO: 2114803 - DNA, 15 bp, Homo sapiens
ttttcaaaactcaca

SEQ ID NO: 2114804 - DNA, 15 bp, Homo sapiens
tttcaaaactcacaa

SEQ ID NO: 2114805 - DNA, 15 bp, Homo sapiens
ttcaaaactcacaat

SEQ ID NO: 2114806 - DNA, 15 bp, Homo sapiens
tcaaaactcacaata

SEQ ID NO: 2114807 - DNA, 15 bp, Homo sapiens
caaaactcacaatat

SEQ ID NO: 2114808 - DNA, 15 bp, Homo sapiens
aaaactcacaatatt

SEQ ID NO: 2114809 - DNA, 15 bp, Homo sapiens
aaactcacaatattg

SEQ ID NO: 2114810 - DNA, 15 bp, Homo sapiens
aactcacaatattgc

SEQ ID NO: 2114811 - DNA, 15 bp, Homo sapiens
actcacaatattgct

SEQ ID NO: 2114812 - DNA, 15 bp, Homo sapiens
ctcacaatattgctc

SEQ ID NO: 2114813 - DNA, 15 bp, Homo sapiens
tcacaatattgctct

SEQ ID NO: 2114814 - DNA, 15 bp, Homo sapiens
cacaatattgctctt

SEQ ID NO: 2114815 - DNA, 15 bp, Homo sapiens
acaatattgctcttt

SEQ ID NO: 2114816 - DNA, 15 bp, Homo sapiens
caatattgctctttg

SEQ ID NO: 2114817 - DNA, 15 bp, Homo sapiens
aatattgctctttga

SEQ ID NO: 2114818 - DNA, 15 bp, Homo sapiens
atattgctctttgag

SEQ ID NO: 2114819 - DNA, 15 bp, Homo sapiens
tattgctctttgaga

SEQ ID NO: 2114820 - DNA, 15 bp, Homo sapiens
attgctctttgagat

SEQ ID NO: 2114821 - DNA, 15 bp, Homo sapiens
ttgctctttgagata

SEQ ID NO: 2114822 - DNA, 15 bp, Homo sapiens
tgctctttgagataa

SEQ ID NO: 2114823 - DNA, 15 bp, Homo sapiens
gctctttgagataaa

SEQ ID NO: 2114824 - DNA, 15 bp, Homo sapiens
ctctttgagataaag

SEQ ID NO: 2114825 - DNA, 15 bp, Homo sapiens
tctttgagataaagg

SEQ ID NO: 2114826 - DNA, 15 bp, Homo sapiens
ctttgagataaaggt

SEQ ID NO: 2114827 - DNA, 15 bp, Homo sapiens
tttgagataaaggtg

SEQ ID NO: 2114828 - DNA, 15 bp, Homo sapiens
ttgagataaaggtga

SEQ ID NO: 2114829 - DNA, 15 bp, Homo sapiens
tgagataaaggtgag

SEQ ID NO: 2114830 - DNA, 15 bp, Homo sapiens
gagataaaggtgagt

SEQ ID NO: 2114831 - DNA, 15 bp, Homo sapiens
agataaaggtgagtc

SEQ ID NO: 2114832 - DNA, 15 bp, Homo sapiens
gataaaggtgagtca

SEQ ID NO: 2114833 - DNA, 15 bp, Homo sapiens
ataaaggtgagtcac

SEQ ID NO: 2114834 - DNA, 15 bp, Homo sapiens
taaaggtgagtcact

SEQ ID NO: 2114835 - DNA, 15 bp, Homo sapiens
aaaggtgagtcactc

SEQ ID NO: 2114836 - DNA, 15 bp, Homo sapiens
aaggtgagtcactct

SEQ ID NO: 2114837 - DNA, 15 bp, Homo sapiens
aggtgagtcactctg

SEQ ID NO: 2114838 - DNA, 15 bp, Homo sapiens
ggtgagtcactctgg

SEQ ID NO: 2114839 - DNA, 15 bp, Homo sapiens
gtgagtcactctgga

SEQ ID NO: 2114840 - DNA, 15 bp, Homo sapiens
tgagtcactctggaa

SEQ ID NO: 2114841 - DNA, 15 bp, Homo sapiens
gagtcactctggaag

SEQ ID NO: 2114842 - DNA, 15 bp, Homo sapiens
agtcactctggaagg

SEQ ID NO: 2114843 - DNA, 15 bp, Homo sapiens
gtcactctggaaggc

SEQ ID NO: 2114844 - DNA, 15 bp, Homo sapiens
tcactctggaaggca

SEQ ID NO: 2114845 - DNA, 15 bp, Homo sapiens
cactctggaaggcaa

SEQ ID NO: 2114846 - DNA, 15 bp, Homo sapiens
actctggaaggcaaa

SEQ ID NO: 2114847 - DNA, 15 bp, Homo sapiens
ctctggaaggcaaat

SEQ ID NO: 2114848 - DNA, 15 bp, Homo sapiens
tctggaaggcaaata

SEQ ID NO: 2114849 - DNA, 15 bp, Homo sapiens
ctggaaggcaaatat

SEQ ID NO: 2114850 - DNA, 15 bp, Homo sapiens
tggaaggcaaatatt

SEQ ID NO: 2114851 - DNA, 15 bp, Homo sapiens
ggaaggcaaatattc

SEQ ID NO: 2114852 - DNA, 15 bp, Homo sapiens
gaaggcaaatattct

SEQ ID NO: 2114853 - DNA, 15 bp, Homo sapiens
aaggcaaatattctc

SEQ ID NO: 2114854 - DNA, 15 bp, Homo sapiens
aggcaaatattctca

SEQ ID NO: 2114855 - DNA, 15 bp, Homo sapiens
ggcaaatattctcac

SEQ ID NO: 2114856 - DNA, 15 bp, Homo sapiens
gcaaatattctcaca

SEQ ID NO: 2114857 - DNA, 15 bp, Homo sapiens
caaatattctcacaa

SEQ ID NO: 2114858 - DNA, 15 bp, Homo sapiens
aaatattctcacaat

SEQ ID NO: 2114859 - DNA, 15 bp, Homo sapiens
aatattctcacaata

SEQ ID NO: 2114860 - DNA, 15 bp, Homo sapiens
atattctcacaataa

SEQ ID NO: 2114861 - DNA, 15 bp, Homo sapiens
tattctcacaataag

SEQ ID NO: 2114862 - DNA, 15 bp, Homo sapiens
attctcacaataaga

SEQ ID NO: 2114863 - DNA, 15 bp, Homo sapiens
ttctcacaataagaa

SEQ ID NO: 2114864 - DNA, 15 bp, Homo sapiens
tctcacaataagaaa

SEQ ID NO: 2114865 - DNA, 15 bp, Homo sapiens
ctcacaataagaaaa

SEQ ID NO: 2114866 - DNA, 15 bp, Homo sapiens
tcacaataagaaaat

SEQ ID NO: 2114867 - DNA, 15 bp, Homo sapiens
cacaataagaaaatt

SEQ ID NO: 2114868 - DNA, 15 bp, Homo sapiens
acaataagaaaattc

SEQ ID NO: 2114869 - DNA, 15 bp, Homo sapiens
caataagaaaattca

SEQ ID NO: 2114870 - DNA, 15 bp, Homo sapiens
aataagaaaattcac

SEQ ID NO: 2114871 - DNA, 15 bp, Homo sapiens
ataagaaaattcaca

SEQ ID NO: 2114872 - DNA, 15 bp, Homo sapiens
taagaaaattcacat

SEQ ID NO: 2114873 - DNA, 15 bp, Homo sapiens
aagaaaattcacata

SEQ ID NO: 2114874 - DNA, 15 bp, Homo sapiens
agaaaattcacatag

SEQ ID NO: 2114875 - DNA, 15 bp, Homo sapiens
gaaaattcacatagg

SEQ ID NO: 2114876 - DNA, 15 bp, Homo sapiens
aaaattcacataggt

SEQ ID NO: 2114877 - DNA, 15 bp, Homo sapiens
aaattcacataggtt

SEQ ID NO: 2114878 - DNA, 15 bp, Homo sapiens
aattcacataggttg

SEQ ID NO: 2114879 - DNA, 15 bp, Homo sapiens
attcacataggttgt

SEQ ID NO: 2114880 - DNA, 15 bp, Homo sapiens
ttcacataggttgtt

SEQ ID NO: 2114881 - DNA, 15 bp, Homo sapiens
tcacataggttgttt

SEQ ID NO: 2114882 - DNA, 15 bp, Homo sapiens
cacataggttgttta

SEQ ID NO: 2114883 - DNA, 15 bp, Homo sapiens
acataggttgtttaa

SEQ ID NO: 2114884 - DNA, 15 bp, Homo sapiens
cataggttgtttaac

SEQ ID NO: 2114885 - DNA, 15 bp, Homo sapiens
ataggttgtttaaca

SEQ ID NO: 2114886 - DNA, 15 bp, Homo sapiens
taggttgtttaacat

SEQ ID NO: 2114887 - DNA, 15 bp, Homo sapiens
aggttgtttaacatt

SEQ ID NO: 2114888 - DNA, 15 bp, Homo sapiens
ggttgtttaacattg

SEQ ID NO: 2114889 - DNA, 15 bp, Homo sapiens
gttgtttaacattgc

SEQ ID NO: 2114890 - DNA, 15 bp, Homo sapiens
ttgtttaacattgca

SEQ ID NO: 2114891 - DNA, 15 bp, Homo sapiens
tgtttaacattgcag

SEQ ID NO: 2114892 - DNA, 15 bp, Homo sapiens
gtttaacattgcagc

SEQ ID NO: 2114893 - DNA, 15 bp, Homo sapiens
tttaacattgcagct

SEQ ID NO: 2114894 - DNA, 15 bp, Homo sapiens
ttaacattgcagcta

SEQ ID NO: 2114895 - DNA, 15 bp, Homo sapiens
taacattgcagctaa

SEQ ID NO: 2114896 - DNA, 15 bp, Homo sapiens
aacattgcagctaaa

SEQ ID NO: 2114897 - DNA, 15 bp, Homo sapiens
acattgcagctaaaa

SEQ ID NO: 2114898 - DNA, 15 bp, Homo sapiens
cattgcagctaaaat

SEQ ID NO: 2114899 - DNA, 15 bp, Homo sapiens
attgcagctaaaata

SEQ ID NO: 2114900 - DNA, 15 bp, Homo sapiens
ttgcagctaaaatac

SEQ ID NO: 2114901 - DNA, 15 bp, Homo sapiens
tgcagctaaaataca

SEQ ID NO: 2114902 - DNA, 15 bp, Homo sapiens
gcagctaaaatacaa

SEQ ID NO: 2114903 - DNA, 15 bp, Homo sapiens
cagctaaaatacaaa

SEQ ID NO: 2114904 - DNA, 15 bp, Homo sapiens
agctaaaatacaaaa

SEQ ID NO: 2114905 - DNA, 15 bp, Homo sapiens
gctaaaatacaaaaa

SEQ ID NO: 2114906 - DNA, 15 bp, Homo sapiens
ctaaaatacaaaaaa

SEQ ID NO: 2114907 - DNA, 15 bp, Homo sapiens
taaaatacaaaaaaa

SEQ ID NO: 2114908 - DNA, 15 bp, Homo sapiens
aatacaaaaaaaaag

SEQ ID NO: 2114909 - DNA, 15 bp, Homo sapiens
atacaaaaaaaaaga

SEQ ID NO: 2114910 - DNA, 15 bp, Homo sapiens
tacaaaaaaaaagaa

SEQ ID NO: 2114911 - DNA, 15 bp, Homo sapiens
acaaaaaaaaagaag

SEQ ID NO: 2114912 - DNA, 15 bp, Homo sapiens
caaaaaaaaagaaga

SEQ ID NO: 2114913 - DNA, 15 bp, Homo sapiens
aaaaaaaaagaagaa

SEQ ID NO: 2114914 - DNA, 15 bp, Homo sapiens
aagaagaagaagaag

SEQ ID NO: 2114915 - DNA, 15 bp, Homo sapiens
agaagaagaagaaga

SEQ ID NO: 2114916 - DNA, 15 bp, Homo sapiens
gaagaagaagaagaa

SEQ ID NO: 2114917 - DNA, 15 bp, Homo sapiens
agaagaagaagaaaa

SEQ ID NO: 2114918 - DNA, 15 bp, Homo sapiens
gaagaagaagaaaaa

SEQ ID NO: 2114919 - DNA, 15 bp, Homo sapiens
aagaagaagaaaaag

SEQ ID NO: 2114920 - DNA, 15 bp, Homo sapiens
agaagaagaaaaaga

SEQ ID NO: 2114921 - DNA, 15 bp, Homo sapiens
gaagaagaaaaagaa

SEQ ID NO: 2114922 - DNA, 15 bp, Homo sapiens
aagaagaaaaagaaa

SEQ ID NO: 2114923 - DNA, 15 bp, Homo sapiens
agaagaaaaagaaaa

SEQ ID NO: 2114924 - DNA, 15 bp, Homo sapiens
gaagaaaaagaaaat

SEQ ID NO: 2114925 - DNA, 15 bp, Homo sapiens
aagaaaaagaaaatt

SEQ ID NO: 2114926 - DNA, 15 bp, Homo sapiens
agaaaaagaaaattc

SEQ ID NO: 2114927 - DNA, 15 bp, Homo sapiens
gaaaaagaaaattca

SEQ ID NO: 2114928 - DNA, 15 bp, Homo sapiens
aaaaagaaaattcac

SEQ ID NO: 2114929 - DNA, 15 bp, Homo sapiens
aaaagaaaattcaca

SEQ ID NO: 2114930 - DNA, 15 bp, Homo sapiens
aaagaaaattcacat

SEQ ID NO: 2114931 - DNA, 15 bp, Homo sapiens
gaaaattcacataga

SEQ ID NO: 2114932 - DNA, 15 bp, Homo sapiens
aaaattcacatagac

SEQ ID NO: 2114933 - DNA, 15 bp, Homo sapiens
aaattcacatagact

SEQ ID NO: 2114934 - DNA, 15 bp, Homo sapiens
aattcacatagacta

SEQ ID NO: 2114935 - DNA, 15 bp, Homo sapiens
attcacatagactac

SEQ ID NO: 2114936 - DNA, 15 bp, Homo sapiens
ttcacatagactact

SEQ ID NO: 2114937 - DNA, 15 bp, Homo sapiens
tcacatagactactg

SEQ ID NO: 2114938 - DNA, 15 bp, Homo sapiens
cacatagactactgg

SEQ ID NO: 2114939 - DNA, 15 bp, Homo sapiens
acatagactactggc

SEQ ID NO: 2114940 - DNA, 15 bp, Homo sapiens
catagactactggcc

SEQ ID NO: 2114941 - DNA, 15 bp, Homo sapiens
atagactactggccc

SEQ ID NO: 2114942 - DNA, 15 bp, Homo sapiens
tagactactggccct

SEQ ID NO: 2114943 - DNA, 15 bp, Homo sapiens
agactactggcccta

SEQ ID NO: 2114944 - DNA, 15 bp, Homo sapiens
gactactggccctag

SEQ ID NO: 2114945 - DNA, 15 bp, Homo sapiens
actactggccctagg

SEQ ID NO: 2114946 - DNA, 15 bp, Homo sapiens
ctactggccctagga

SEQ ID NO: 2114947 - DNA, 15 bp, Homo sapiens
tactggccctaggag

SEQ ID NO: 2114948 - DNA, 15 bp, Homo sapiens
actggccctaggaga

SEQ ID NO: 2114949 - DNA, 15 bp, Homo sapiens
ctggccctaggagaa

SEQ ID NO: 2114950 - DNA, 15 bp, Homo sapiens
tggccctaggagaat

SEQ ID NO: 2114951 - DNA, 15 bp, Homo sapiens
ggccctaggagaatt

SEQ ID NO: 2114952 - DNA, 15 bp, Homo sapiens
gccctaggagaattt

SEQ ID NO: 2114953 - DNA, 15 bp, Homo sapiens
ccctaggagaattta

SEQ ID NO: 2114954 - DNA, 15 bp, Homo sapiens
cctaggagaatttat

SEQ ID NO: 2114955 - DNA, 15 bp, Homo sapiens
ctaggagaatttatc

SEQ ID NO: 2114956 - DNA, 15 bp, Homo sapiens
taggagaatttatct

SEQ ID NO: 2114957 - DNA, 15 bp, Homo sapiens
aggagaatttatcta

SEQ ID NO: 2114958 - DNA, 15 bp, Homo sapiens
ggagaatttatctaa

SEQ ID NO: 2114959 - DNA, 15 bp, Homo sapiens
gagaatttatctaaa

SEQ ID NO: 2114960 - DNA, 15 bp, Homo sapiens
agaatttatctaaag

SEQ ID NO: 2114961 - DNA, 15 bp, Homo sapiens
gaatttatctaaaga

SEQ ID NO: 2114962 - DNA, 15 bp, Homo sapiens
aatttatctaaagat

SEQ ID NO: 2114963 - DNA, 15 bp, Homo sapiens
atttatctaaagatt

SEQ ID NO: 2114964 - DNA, 15 bp, Homo sapiens
tttatctaaagatta

SEQ ID NO: 2114965 - DNA, 15 bp, Homo sapiens
ttatctaaagattat

SEQ ID NO: 2114966 - DNA, 15 bp, Homo sapiens
tatctaaagattatg

SEQ ID NO: 2114967 - DNA, 15 bp, Homo sapiens
atctaaagattatga

SEQ ID NO: 2114968 - DNA, 15 bp, Homo sapiens
tctaaagattatgag

SEQ ID NO: 2114969 - DNA, 15 bp, Homo sapiens
ctaaagattatgagt

SEQ ID NO: 2114970 - DNA, 15 bp, Homo sapiens
taaagattatgagta

SEQ ID NO: 2114971 - DNA, 15 bp, Homo sapiens
aaagattatgagtac

SEQ ID NO: 2114972 - DNA, 15 bp, Homo sapiens
aagattatgagtaca

SEQ ID NO: 2114973 - DNA, 15 bp, Homo sapiens
agattatgagtacaa

SEQ ID NO: 2114974 - DNA, 15 bp, Homo sapiens
gattatgagtacaat

SEQ ID NO: 2114975 - DNA, 15 bp, Homo sapiens
attatgagtacaata

SEQ ID NO: 2114976 - DNA, 15 bp, Homo sapiens
ttatgagtacaatag

SEQ ID NO: 2114977 - DNA, 15 bp, Homo sapiens
tatgagtacaataga

SEQ ID NO: 2114978 - DNA, 15 bp, Homo sapiens
atgagtacaatagat

SEQ ID NO: 2114979 - DNA, 15 bp, Homo sapiens
tgagtacaatagata

SEQ ID NO: 2114980 - DNA, 15 bp, Homo sapiens
gagtacaatagatag

SEQ ID NO: 2114981 - DNA, 15 bp, Homo sapiens
agtacaatagataga

SEQ ID NO: 2114982 - DNA, 15 bp, Homo sapiens
gtacaatagatagat

SEQ ID NO: 2114983 - DNA, 15 bp, Homo sapiens
tacaatagatagatc

SEQ ID NO: 2114984 - DNA, 15 bp, Homo sapiens
acaatagatagatct

SEQ ID NO: 2114985 - DNA, 15 bp, Homo sapiens
caatagatagatctt

SEQ ID NO: 2114986 - DNA, 15 bp, Homo sapiens
aatagatagatcttc

SEQ ID NO: 2114987 - DNA, 15 bp, Homo sapiens
atagatagatcttcc

SEQ ID NO: 2114988 - DNA, 15 bp, Homo sapiens
tagatagatcttcct

SEQ ID NO: 2114989 - DNA, 15 bp, Homo sapiens
agatagatcttccta

SEQ ID NO: 2114990 - DNA, 15 bp, Homo sapiens
gatagatcttcctag

SEQ ID NO: 2114991 - DNA, 15 bp, Homo sapiens
tagatcttcctagat

SEQ ID NO: 2114992 - DNA, 15 bp, Homo sapiens
agatcttcctagata

SEQ ID NO: 2114993 - DNA, 15 bp, Homo sapiens
gatcttcctagataa

SEQ ID NO: 2114994 - DNA, 15 bp, Homo sapiens
atcttcctagataac

SEQ ID NO: 2114995 - DNA, 15 bp, Homo sapiens
tcttcctagataact

SEQ ID NO: 2114996 - DNA, 15 bp, Homo sapiens
cttcctagataactc

SEQ ID NO: 2114997 - DNA, 15 bp, Homo sapiens
ttcctagataactct

SEQ ID NO: 2114998 - DNA, 15 bp, Homo sapiens
tcctagataactctc

SEQ ID NO: 2114999 - DNA, 15 bp, Homo sapiens
cctagataactctca

SEQ ID NO: 2115000 - DNA, 15 bp, Homo sapiens
ctagataactctcaa

SEQ ID NO: 2115001 - DNA, 15 bp, Homo sapiens
tagataactctcaac

SEQ ID NO: 2115002 - DNA, 15 bp, Homo sapiens
agataactctcaact

SEQ ID NO: 2115003 - DNA, 15 bp, Homo sapiens
gataactctcaactt

SEQ ID NO: 2115004 - DNA, 15 bp, Homo sapiens
ataactctcaactta

SEQ ID NO: 2115005 - DNA, 15 bp, Homo sapiens
taactctcaacttag

SEQ ID NO: 2115006 - DNA, 15 bp, Homo sapiens
aactctcaacttagc

SEQ ID NO: 2115007 - DNA, 15 bp, Homo sapiens
actctcaacttagct

SEQ ID NO: 2115008 - DNA, 15 bp, Homo sapiens
ctctcaacttagctt

SEQ ID NO: 2115009 - DNA, 15 bp, Homo sapiens
tctcaacttagcttt

SEQ ID NO: 2115010 - DNA, 15 bp, Homo sapiens
ctcaacttagctttc

SEQ ID NO: 2115011 - DNA, 15 bp, Homo sapiens
tcaacttagctttct

SEQ ID NO: 2115012 - DNA, 15 bp, Homo sapiens
caacttagctttcta

SEQ ID NO: 2115013 - DNA, 15 bp, Homo sapiens
aacttagctttctag

SEQ ID NO: 2115014 - DNA, 15 bp, Homo sapiens
acttagctttctagt

SEQ ID NO: 2115015 - DNA, 15 bp, Homo sapiens
cttagctttctagtt

SEQ ID NO: 2115016 - DNA, 15 bp, Homo sapiens
ttagctttctagttc

SEQ ID NO: 2115017 - DNA, 15 bp, Homo sapiens
tagctttctagttcc

SEQ ID NO: 2115018 - DNA, 15 bp, Homo sapiens
agctttctagttcct

SEQ ID NO: 2115019 - DNA, 15 bp, Homo sapiens
gctttctagttccta

SEQ ID NO: 2115020 - DNA, 15 bp, Homo sapiens
ctttctagttcctag

SEQ ID NO: 2115021 - DNA, 15 bp, Homo sapiens
tttctagttcctaga

SEQ ID NO: 2115022 - DNA, 15 bp, Homo sapiens
ttctagttcctagac

SEQ ID NO: 2115023 - DNA, 15 bp, Homo sapiens
tctagttcctagact

SEQ ID NO: 2115024 - DNA, 15 bp, Homo sapiens
ctagttcctagactt

SEQ ID NO: 2115025 - DNA, 15 bp, Homo sapiens
tagttcctagacttt

SEQ ID NO: 2115026 - DNA, 15 bp, Homo sapiens
agttcctagactttc

SEQ ID NO: 2115027 - DNA, 15 bp, Homo sapiens
gttcctagactttct

SEQ ID NO: 2115028 - DNA, 15 bp, Homo sapiens
ttcctagactttcta

SEQ ID NO: 2115029 - DNA, 15 bp, Homo sapiens
tcctagactttctaa

SEQ ID NO: 2115030 - DNA, 15 bp, Homo sapiens
cctagactttctaac

SEQ ID NO: 2115031 - DNA, 15 bp, Homo sapiens
ctagactttctaaca

SEQ ID NO: 2115032 - DNA, 15 bp, Homo sapiens
tagactttctaacaa

SEQ ID NO: 2115033 - DNA, 15 bp, Homo sapiens
agactttctaacaat

SEQ ID NO: 2115034 - DNA, 15 bp, Homo sapiens
gactttctaacaatt

SEQ ID NO: 2115035 - DNA, 15 bp, Homo sapiens
actttctaacaattt

SEQ ID NO: 2115036 - DNA, 15 bp, Homo sapiens
ctttctaacaatttg

SEQ ID NO: 2115037 - DNA, 15 bp, Homo sapiens
tttctaacaatttgt

SEQ ID NO: 2115038 - DNA, 15 bp, Homo sapiens
ttctaacaatttgtt

SEQ ID NO: 2115039 - DNA, 15 bp, Homo sapiens
tctaacaatttgtta

SEQ ID NO: 2115040 - DNA, 15 bp, Homo sapiens
ctaacaatttgttag

SEQ ID NO: 2115041 - DNA, 15 bp, Homo sapiens
taacaatttgttagt

SEQ ID NO: 2115042 - DNA, 15 bp, Homo sapiens
aacaatttgttagta

SEQ ID NO: 2115043 - DNA, 15 bp, Homo sapiens
acaatttgttagtaa

SEQ ID NO: 2115044 - DNA, 15 bp, Homo sapiens
caatttgttagtaac

SEQ ID NO: 2115045 - DNA, 15 bp, Homo sapiens
aatttgttagtaact

SEQ ID NO: 2115046 - DNA, 15 bp, Homo sapiens
atttgttagtaactc

SEQ ID NO: 2115047 - DNA, 15 bp, Homo sapiens
tttgttagtaactct

SEQ ID NO: 2115048 - DNA, 15 bp, Homo sapiens
ttgttagtaactctc

SEQ ID NO: 2115049 - DNA, 15 bp, Homo sapiens
tgttagtaactctct

SEQ ID NO: 2115050 - DNA, 15 bp, Homo sapiens
gttagtaactctcta

SEQ ID NO: 2115051 - DNA, 15 bp, Homo sapiens
ttagtaactctctat

SEQ ID NO: 2115052 - DNA, 15 bp, Homo sapiens
tagtaactctctatt

SEQ ID NO: 2115053 - DNA, 15 bp, Homo sapiens
agtaactctctattt

SEQ ID NO: 2115054 - DNA, 15 bp, Homo sapiens
gtaactctctatttc

SEQ ID NO: 2115055 - DNA, 15 bp, Homo sapiens
taactctctatttct

SEQ ID NO: 2115056 - DNA, 15 bp, Homo sapiens
aactctctatttcta

SEQ ID NO: 2115057 - DNA, 15 bp, Homo sapiens
actctctatttctaa

SEQ ID NO: 2115058 - DNA, 15 bp, Homo sapiens
ctctctatttctaaa

SEQ ID NO: 2115059 - DNA, 15 bp, Homo sapiens
tctctatttctaaat

SEQ ID NO: 2115060 - DNA, 15 bp, Homo sapiens
ctctatttctaaatc

SEQ ID NO: 2115061 - DNA, 15 bp, Homo sapiens
tctatttctaaatct

SEQ ID NO: 2115062 - DNA, 15 bp, Homo sapiens
ctatttctaaatcta

SEQ ID NO: 2115063 - DNA, 15 bp, Homo sapiens
tatttctaaatctac

SEQ ID NO: 2115064 - DNA, 15 bp, Homo sapiens
atttctaaatctaca

SEQ ID NO: 2115065 - DNA, 15 bp, Homo sapiens
tttctaaatctacag

SEQ ID NO: 2115066 - DNA, 15 bp, Homo sapiens
ttctaaatctacaga

SEQ ID NO: 2115067 - DNA, 15 bp, Homo sapiens
tctaaatctacagag

SEQ ID NO: 2115068 - DNA, 15 bp, Homo sapiens
ctaaatctacagaga

SEQ ID NO: 2115069 - DNA, 15 bp, Homo sapiens
taaatctacagagat

SEQ ID NO: 2115070 - DNA, 15 bp, Homo sapiens
aaatctacagagatt

SEQ ID NO: 2115071 - DNA, 15 bp, Homo sapiens
aatctacagagattt

SEQ ID NO: 2115072 - DNA, 15 bp, Homo sapiens
atctacagagatttc

SEQ ID NO: 2115073 - DNA, 15 bp, Homo sapiens
tctacagagatttct

SEQ ID NO: 2115074 - DNA, 15 bp, Homo sapiens
ctacagagatttcta

SEQ ID NO: 2115075 - DNA, 15 bp, Homo sapiens
tacagagatttctag

SEQ ID NO: 2115076 - DNA, 15 bp, Homo sapiens
acagagatttctagt

SEQ ID NO: 2115077 - DNA, 15 bp, Homo sapiens
cagagatttctagtc

SEQ ID NO: 2115078 - DNA, 15 bp, Homo sapiens
agagatttctagtca

SEQ ID NO: 2115079 - DNA, 15 bp, Homo sapiens
gagatttctagtcaa

SEQ ID NO: 2115080 - DNA, 15 bp, Homo sapiens
agatttctagtcaat

SEQ ID NO: 2115081 - DNA, 15 bp, Homo sapiens
gatttctagtcaatt

SEQ ID NO: 2115082 - DNA, 15 bp, Homo sapiens
atttctagtcaatta

SEQ ID NO: 2115083 - DNA, 15 bp, Homo sapiens
tttctagtcaattat

SEQ ID NO: 2115084 - DNA, 15 bp, Homo sapiens
ttctagtcaattata

SEQ ID NO: 2115085 - DNA, 15 bp, Homo sapiens
tctagtcaattataa

SEQ ID NO: 2115086 - DNA, 15 bp, Homo sapiens
ctagtcaattataac

SEQ ID NO: 2115087 - DNA, 15 bp, Homo sapiens
tagtcaattataaca

SEQ ID NO: 2115088 - DNA, 15 bp, Homo sapiens
agtcaattataacat

SEQ ID NO: 2115089 - DNA, 15 bp, Homo sapiens
gtcaattataacatt

SEQ ID NO: 2115090 - DNA, 15 bp, Homo sapiens
tcaattataacattt

SEQ ID NO: 2115091 - DNA, 15 bp, Homo sapiens
caattataacatttc

SEQ ID NO: 2115092 - DNA, 15 bp, Homo sapiens
aattataacatttca

SEQ ID NO: 2115093 - DNA, 15 bp, Homo sapiens
attataacatttcaa

SEQ ID NO: 2115094 - DNA, 15 bp, Homo sapiens
ttataacatttcaag

SEQ ID NO: 2115095 - DNA, 15 bp, Homo sapiens
tataacatttcaaga

SEQ ID NO: 2115096 - DNA, 15 bp, Homo sapiens
ataacatttcaagag

SEQ ID NO: 2115097 - DNA, 15 bp, Homo sapiens
taacatttcaagagt

SEQ ID NO: 2115098 - DNA, 15 bp, Homo sapiens
aacatttcaagagtt

SEQ ID NO: 2115099 - DNA, 15 bp, Homo sapiens
acatttcaagagttc

SEQ ID NO: 2115100 - DNA, 15 bp, Homo sapiens
catttcaagagttct

SEQ ID NO: 2115101 - DNA, 15 bp, Homo sapiens
atttcaagagttctt

SEQ ID NO: 2115102 - DNA, 15 bp, Homo sapiens
tttcaagagttctta

SEQ ID NO: 2115103 - DNA, 15 bp, Homo sapiens
ttcaagagttcttac

SEQ ID NO: 2115104 - DNA, 15 bp, Homo sapiens
tcaagagttcttacc

SEQ ID NO: 2115105 - DNA, 15 bp, Homo sapiens
caagagttcttaccc

SEQ ID NO: 2115106 - DNA, 15 bp, Homo sapiens
aagagttcttaccca

SEQ ID NO: 2115107 - DNA, 15 bp, Homo sapiens
agagttcttacccat

SEQ ID NO: 2115108 - DNA, 15 bp, Homo sapiens
gagttcttacccatg

SEQ ID NO: 2115109 - DNA, 15 bp, Homo sapiens
agttcttacccatga

SEQ ID NO: 2115110 - DNA, 15 bp, Homo sapiens
gttcttacccatgaa

SEQ ID NO: 2115111 - DNA, 15 bp, Homo sapiens
ttcttacccatgaaa

SEQ ID NO: 2115112 - DNA, 15 bp, Homo sapiens
tcttacccatgaaaa

SEQ ID NO: 2115113 - DNA, 15 bp, Homo sapiens
cttacccatgaaaat

SEQ ID NO: 2115114 - DNA, 15 bp, Homo sapiens
ttacccatgaaaata

SEQ ID NO: 2115115 - DNA, 15 bp, Homo sapiens
tacccatgaaaatat

SEQ ID NO: 2115116 - DNA, 15 bp, Homo sapiens
acccatgaaaatatt

SEQ ID NO: 2115117 - DNA, 15 bp, Homo sapiens
cccatgaaaatattt

SEQ ID NO: 2115118 - DNA, 15 bp, Homo sapiens
ccatgaaaatatttc

SEQ ID NO: 2115119 - DNA, 15 bp, Homo sapiens
catgaaaatatttca

SEQ ID NO: 2115120 - DNA, 15 bp, Homo sapiens
atgaaaatatttcat

SEQ ID NO: 2115121 - DNA, 15 bp, Homo sapiens
tgaaaatatttcatg

SEQ ID NO: 2115122 - DNA, 15 bp, Homo sapiens
gaaaatatttcatga

SEQ ID NO: 2115123 - DNA, 15 bp, Homo sapiens
aaaatatttcatgaa

SEQ ID NO: 2115124 - DNA, 15 bp, Homo sapiens
aaatatttcatgaaa

SEQ ID NO: 2115125 - DNA, 15 bp, Homo sapiens
aatatttcatgaaat

SEQ ID NO: 2115126 - DNA, 15 bp, Homo sapiens
atatttcatgaaatt

SEQ ID NO: 2115127 - DNA, 15 bp, Homo sapiens
tatttcatgaaattt

SEQ ID NO: 2115128 - DNA, 15 bp, Homo sapiens
atttcatgaaattta

SEQ ID NO: 2115129 - DNA, 15 bp, Homo sapiens
tttcatgaaatttat

SEQ ID NO: 2115130 - DNA, 15 bp, Homo sapiens
ttcatgaaatttata

SEQ ID NO: 2115131 - DNA, 15 bp, Homo sapiens
tcatgaaatttatag

SEQ ID NO: 2115132 - DNA, 15 bp, Homo sapiens
catgaaatttatagc

SEQ ID NO: 2115133 - DNA, 15 bp, Homo sapiens
atgaaatttatagct

SEQ ID NO: 2115134 - DNA, 15 bp, Homo sapiens
tgaaatttatagcta

SEQ ID NO: 2115135 - DNA, 15 bp, Homo sapiens
gaaatttatagctac

SEQ ID NO: 2115136 - DNA, 15 bp, Homo sapiens
aaatttatagctacc

SEQ ID NO: 2115137 - DNA, 15 bp, Homo sapiens
aatttatagctaccc

SEQ ID NO: 2115138 - DNA, 15 bp, Homo sapiens
atttatagctaccca

SEQ ID NO: 2115139 - DNA, 15 bp, Homo sapiens
tttatagctacccac

SEQ ID NO: 2115140 - DNA, 15 bp, Homo sapiens
ttatagctacccact

SEQ ID NO: 2115141 - DNA, 15 bp, Homo sapiens
tatagctacccacta

SEQ ID NO: 2115142 - DNA, 15 bp, Homo sapiens
atagctacccactat

SEQ ID NO: 2115143 - DNA, 15 bp, Homo sapiens
tagctacccactatt

SEQ ID NO: 2115144 - DNA, 15 bp, Homo sapiens
agctacccactattt

SEQ ID NO: 2115145 - DNA, 15 bp, Homo sapiens
gctacccactattta

SEQ ID NO: 2115146 - DNA, 15 bp, Homo sapiens
ctacccactatttac

SEQ ID NO: 2115147 - DNA, 15 bp, Homo sapiens
tacccactatttacg

SEQ ID NO: 2115148 - DNA, 15 bp, Homo sapiens
acccactatttacga

SEQ ID NO: 2115149 - DNA, 15 bp, Homo sapiens
cccactatttacgaa

SEQ ID NO: 2115150 - DNA, 15 bp, Homo sapiens
ccactatttacgaag

SEQ ID NO: 2115151 - DNA, 15 bp, Homo sapiens
cactatttacgaaga

SEQ ID NO: 2115152 - DNA, 15 bp, Homo sapiens
actatttacgaagaa

SEQ ID NO: 2115153 - DNA, 15 bp, Homo sapiens
ctatttacgaagaat

SEQ ID NO: 2115154 - DNA, 15 bp, Homo sapiens
tatttacgaagaatg

SEQ ID NO: 2115155 - DNA, 15 bp, Homo sapiens
atttacgaagaatgc

SEQ ID NO: 2115156 - DNA, 15 bp, Homo sapiens
tttacgaagaatgct

SEQ ID NO: 2115157 - DNA, 15 bp, Homo sapiens
ttacgaagaatgctg

SEQ ID NO: 2115158 - DNA, 15 bp, Homo sapiens
tacgaagaatgctgg

SEQ ID NO: 2115159 - DNA, 15 bp, Homo sapiens
acgaagaatgctggg

SEQ ID NO: 2115160 - DNA, 15 bp, Homo sapiens
cgaagaatgctgggc

SEQ ID NO: 2115161 - DNA, 15 bp, Homo sapiens
gaagaatgctgggca

SEQ ID NO: 2115162 - DNA, 15 bp, Homo sapiens
aagaatgctgggcaa

SEQ ID NO: 2115163 - DNA, 15 bp, Homo sapiens
agaatgctgggcaaa

SEQ ID NO: 2115164 - DNA, 15 bp, Homo sapiens
gaatgctgggcaaag

SEQ ID NO: 2115165 - DNA, 15 bp, Homo sapiens
aatgctgggcaaagc

SEQ ID NO: 2115166 - DNA, 15 bp, Homo sapiens
atgctgggcaaagcc

SEQ ID NO: 2115167 - DNA, 15 bp, Homo sapiens
tgctgggcaaagcct

SEQ ID NO: 2115168 - DNA, 15 bp, Homo sapiens
gctgggcaaagccta

SEQ ID NO: 2115169 - DNA, 15 bp, Homo sapiens
ctgggcaaagcctat

SEQ ID NO: 2115170 - DNA, 15 bp, Homo sapiens
tgggcaaagcctata

SEQ ID NO: 2115171 - DNA, 15 bp, Homo sapiens
gggcaaagcctatac

SEQ ID NO: 2115172 - DNA, 15 bp, Homo sapiens
ggcaaagcctatacg

SEQ ID NO: 2115173 - DNA, 15 bp, Homo sapiens
gcaaagcctatacgt

SEQ ID NO: 2115174 - DNA, 15 bp, Homo sapiens
caaagcctatacgtt

SEQ ID NO: 2115175 - DNA, 15 bp, Homo sapiens
aaagcctatacgttc

SEQ ID NO: 2115176 - DNA, 15 bp, Homo sapiens
aagcctatacgttca

SEQ ID NO: 2115177 - DNA, 15 bp, Homo sapiens
agcctatacgttcag

SEQ ID NO: 2115178 - DNA, 15 bp, Homo sapiens
gcctatacgttcagg

SEQ ID NO: 2115179 - DNA, 15 bp, Homo sapiens
cctatacgttcagga

SEQ ID NO: 2115180 - DNA, 15 bp, Homo sapiens
ctatacgttcaggat

SEQ ID NO: 2115181 - DNA, 15 bp, Homo sapiens
tatacgttcaggatt

SEQ ID NO: 2115182 - DNA, 15 bp, Homo sapiens
atacgttcaggattt

SEQ ID NO: 2115183 - DNA, 15 bp, Homo sapiens
tacgttcaggattta

SEQ ID NO: 2115184 - DNA, 15 bp, Homo sapiens
acgttcaggatttat

SEQ ID NO: 2115185 - DNA, 15 bp, Homo sapiens
cgttcaggatttatt

SEQ ID NO: 2115186 - DNA, 15 bp, Homo sapiens
gttcaggatttattg

SEQ ID NO: 2115187 - DNA, 15 bp, Homo sapiens
ttcaggatttattgc

SEQ ID NO: 2115188 - DNA, 15 bp, Homo sapiens
tcaggatttattgca

SEQ ID NO: 2115189 - DNA, 15 bp, Homo sapiens
caggatttattgcac

SEQ ID NO: 2115190 - DNA, 15 bp, Homo sapiens
aggatttattgcacc

SEQ ID NO: 2115191 - DNA, 15 bp, Homo sapiens
ggatttattgcaccg

SEQ ID NO: 2115192 - DNA, 15 bp, Homo sapiens
gatttattgcaccga

SEQ ID NO: 2115193 - DNA, 15 bp, Homo sapiens
atttattgcaccgaa

SEQ ID NO: 2115194 - DNA, 15 bp, Homo sapiens
tttattgcaccgaat

SEQ ID NO: 2115195 - DNA, 15 bp, Homo sapiens
ttattgcaccgaatg

SEQ ID NO: 2115196 - DNA, 15 bp, Homo sapiens
tattgcaccgaatgg

SEQ ID NO: 2115197 - DNA, 15 bp, Homo sapiens
attgcaccgaatggt

SEQ ID NO: 2115198 - DNA, 15 bp, Homo sapiens
ttgcaccgaatggtc

SEQ ID NO: 2115199 - DNA, 15 bp, Homo sapiens
tgcaccgaatggtca

SEQ ID NO: 2115200 - DNA, 15 bp, Homo sapiens
gcaccgaatggtcac

SEQ ID NO: 2115201 - DNA, 15 bp, Homo sapiens
caccgaatggtcacc

SEQ ID NO: 2115202 - DNA, 15 bp, Homo sapiens
accgaatggtcacct

SEQ ID NO: 2115203 - DNA, 15 bp, Homo sapiens
ccgaatggtcacctt

SEQ ID NO: 2115204 - DNA, 15 bp, Homo sapiens
cgaatggtcaccttt

SEQ ID NO: 2115205 - DNA, 15 bp, Homo sapiens
gaatggtcaccttta

SEQ ID NO: 2115206 - DNA, 15 bp, Homo sapiens
aatggtcacctttat

SEQ ID NO: 2115207 - DNA, 15 bp, Homo sapiens
atggtcacctttatc

SEQ ID NO: 2115208 - DNA, 15 bp, Homo sapiens
tggtcacctttatct

SEQ ID NO: 2115209 - DNA, 15 bp, Homo sapiens
ggtcacctttatctg

SEQ ID NO: 2115210 - DNA, 15 bp, Homo sapiens
gtcacctttatctgc

SEQ ID NO: 2115211 - DNA, 15 bp, Homo sapiens
tcacctttatctgcc

SEQ ID NO: 2115212 - DNA, 15 bp, Homo sapiens
cacctttatctgcca

SEQ ID NO: 2115213 - DNA, 15 bp, Homo sapiens
acctttatctgccaa

SEQ ID NO: 2115214 - DNA, 15 bp, Homo sapiens
cctttatctgccaat

SEQ ID NO: 2115215 - DNA, 15 bp, Homo sapiens
ctttatctgccaatt

SEQ ID NO: 2115216 - DNA, 15 bp, Homo sapiens
tttatctgccaattc

SEQ ID NO: 2115217 - DNA, 15 bp, Homo sapiens
ttatctgccaattct

SEQ ID NO: 2115218 - DNA, 15 bp, Homo sapiens
tatctgccaattctc

SEQ ID NO: 2115219 - DNA, 15 bp, Homo sapiens
atctgccaattctca

SEQ ID NO: 2115220 - DNA, 15 bp, Homo sapiens
tctgccaattctcac

SEQ ID NO: 2115221 - DNA, 15 bp, Homo sapiens
ctgccaattctcact

SEQ ID NO: 2115222 - DNA, 15 bp, Homo sapiens
tgccaattctcactc

SEQ ID NO: 2115223 - DNA, 15 bp, Homo sapiens
gccaattctcactcg

SEQ ID NO: 2115224 - DNA, 15 bp, Homo sapiens
ccaattctcactcgc

SEQ ID NO: 2115225 - DNA, 15 bp, Homo sapiens
caattctcactcgct

SEQ ID NO: 2115226 - DNA, 15 bp, Homo sapiens
aattctcactcgcta

SEQ ID NO: 2115227 - DNA, 15 bp, Homo sapiens
attctcactcgctaa

SEQ ID NO: 2115228 - DNA, 15 bp, Homo sapiens
ttctcactcgctaat

SEQ ID NO: 2115229 - DNA, 15 bp, Homo sapiens
tctcactcgctaatc

SEQ ID NO: 2115230 - DNA, 15 bp, Homo sapiens
ctcactcgctaatca

SEQ ID NO: 2115231 - DNA, 15 bp, Homo sapiens
tcactcgctaatcag

SEQ ID NO: 2115232 - DNA, 15 bp, Homo sapiens
cactcgctaatcagc

SEQ ID NO: 2115233 - DNA, 15 bp, Homo sapiens
actcgctaatcagcc

SEQ ID NO: 2115234 - DNA, 15 bp, Homo sapiens
ctcgctaatcagcct

SEQ ID NO: 2115235 - DNA, 15 bp, Homo sapiens
tcgctaatcagcctc

SEQ ID NO: 2115236 - DNA, 15 bp, Homo sapiens
cgctaatcagcctct

SEQ ID NO: 2115237 - DNA, 15 bp, Homo sapiens
gctaatcagcctctc

SEQ ID NO: 2115238 - DNA, 15 bp, Homo sapiens
ctaatcagcctctcc

SEQ ID NO: 2115239 - DNA, 15 bp, Homo sapiens
taatcagcctctccc

SEQ ID NO: 2115240 - DNA, 15 bp, Homo sapiens
aatcagcctctccca

SEQ ID NO: 2115241 - DNA, 15 bp, Homo sapiens
atcagcctctcccaa

SEQ ID NO: 2115242 - DNA, 15 bp, Homo sapiens
tcagcctctcccaac

SEQ ID NO: 2115243 - DNA, 15 bp, Homo sapiens
cagcctctcccaaca

SEQ ID NO: 2115244 - DNA, 15 bp, Homo sapiens
agcctctcccaacac

SEQ ID NO: 2115245 - DNA, 15 bp, Homo sapiens
gcctctcccaacact

SEQ ID NO: 2115246 - DNA, 15 bp, Homo sapiens
cctctcccaacactg

SEQ ID NO: 2115247 - DNA, 15 bp, Homo sapiens
ctctcccaacactga

SEQ ID NO: 2115248 - DNA, 15 bp, Homo sapiens
tctcccaacactgac

SEQ ID NO: 2115249 - DNA, 15 bp, Homo sapiens
ctcccaacactgacc

SEQ ID NO: 2115250 - DNA, 15 bp, Homo sapiens
tcccaacactgacct

SEQ ID NO: 2115251 - DNA, 15 bp, Homo sapiens
cccaacactgaccta

SEQ ID NO: 2115252 - DNA, 15 bp, Homo sapiens
ccaacactgacctag

SEQ ID NO: 2115253 - DNA, 15 bp, Homo sapiens
caacactgacctaga

SEQ ID NO: 2115254 - DNA, 15 bp, Homo sapiens
aacactgacctagag

SEQ ID NO: 2115255 - DNA, 15 bp, Homo sapiens
acactgacctagaga

SEQ ID NO: 2115256 - DNA, 15 bp, Homo sapiens
cactgacctagagaa

SEQ ID NO: 2115257 - DNA, 15 bp, Homo sapiens
actgacctagagaat

SEQ ID NO: 2115258 - DNA, 15 bp, Homo sapiens
ctgacctagagaatg

SEQ ID NO: 2115259 - DNA, 15 bp, Homo sapiens
tgacctagagaatgt

SEQ ID NO: 2115260 - DNA, 15 bp, Homo sapiens
gacctagagaatgta

SEQ ID NO: 2115261 - DNA, 15 bp, Homo sapiens
acctagagaatgtag

SEQ ID NO: 2115262 - DNA, 15 bp, Homo sapiens
cctagagaatgtagg

SEQ ID NO: 2115263 - DNA, 15 bp, Homo sapiens
ctagagaatgtaggg

SEQ ID NO: 2115264 - DNA, 15 bp, Homo sapiens
tagagaatgtagggt

SEQ ID NO: 2115265 - DNA, 15 bp, Homo sapiens
agagaatgtagggtc

SEQ ID NO: 2115266 - DNA, 15 bp, Homo sapiens
gagaatgtagggtcc

SEQ ID NO: 2115267 - DNA, 15 bp, Homo sapiens
agaatgtagggtcct

SEQ ID NO: 2115268 - DNA, 15 bp, Homo sapiens
gaatgtagggtcctg

SEQ ID NO: 2115269 - DNA, 15 bp, Homo sapiens
aatgtagggtcctgg

SEQ ID NO: 2115270 - DNA, 15 bp, Homo sapiens
atgtagggtcctggt

SEQ ID NO: 2115271 - DNA, 15 bp, Homo sapiens
tgtagggtcctggtt

SEQ ID NO: 2115272 - DNA, 15 bp, Homo sapiens
gtagggtcctggttc

SEQ ID NO: 2115273 - DNA, 15 bp, Homo sapiens
tagggtcctggttct

SEQ ID NO: 2115274 - DNA, 15 bp, Homo sapiens
agggtcctggttctt

SEQ ID NO: 2115275 - DNA, 15 bp, Homo sapiens
gggtcctggttcttt

SEQ ID NO: 2115276 - DNA, 15 bp, Homo sapiens
ggtcctggttcttta

SEQ ID NO: 2115277 - DNA, 15 bp, Homo sapiens
gtcctggttctttag

SEQ ID NO: 2115278 - DNA, 15 bp, Homo sapiens
tcctggttctttagc

SEQ ID NO: 2115279 - DNA, 15 bp, Homo sapiens
cctggttctttagct

SEQ ID NO: 2115280 - DNA, 15 bp, Homo sapiens
ctggttctttagctc

SEQ ID NO: 2115281 - DNA, 15 bp, Homo sapiens
tggttctttagctcc

SEQ ID NO: 2115282 - DNA, 15 bp, Homo sapiens
ggttctttagctcct

SEQ ID NO: 2115283 - DNA, 15 bp, Homo sapiens
gttctttagctcctg

SEQ ID NO: 2115284 - DNA, 15 bp, Homo sapiens
ttctttagctcctgc

SEQ ID NO: 2115285 - DNA, 15 bp, Homo sapiens
tctttagctcctgcc

SEQ ID NO: 2115286 - DNA, 15 bp, Homo sapiens
ctttagctcctgcct

SEQ ID NO: 2115287 - DNA, 15 bp, Homo sapiens
tttagctcctgcctg

SEQ ID NO: 2115288 - DNA, 15 bp, Homo sapiens
ttagctcctgcctga

SEQ ID NO: 2115289 - DNA, 15 bp, Homo sapiens
tagctcctgcctgat

SEQ ID NO: 2115290 - DNA, 15 bp, Homo sapiens
agctcctgcctgatg

SEQ ID NO: 2115291 - DNA, 15 bp, Homo sapiens
gctcctgcctgatga

SEQ ID NO: 2115292 - DNA, 15 bp, Homo sapiens
ctcctgcctgatgac

SEQ ID NO: 2115293 - DNA, 15 bp, Homo sapiens
tcctgcctgatgaca

SEQ ID NO: 2115294 - DNA, 15 bp, Homo sapiens
cctgcctgatgacag

SEQ ID NO: 2115295 - DNA, 15 bp, Homo sapiens
ctgcctgatgacaga

SEQ ID NO: 2115296 - DNA, 15 bp, Homo sapiens
tgcctgatgacagat

SEQ ID NO: 2115297 - DNA, 15 bp, Homo sapiens
gcctgatgacagata

SEQ ID NO: 2115298 - DNA, 15 bp, Homo sapiens
cctgatgacagataa

SEQ ID NO: 2115299 - DNA, 15 bp, Homo sapiens
ctgatgacagataac

SEQ ID NO: 2115300 - DNA, 15 bp, Homo sapiens
tgatgacagataact

SEQ ID NO: 2115301 - DNA, 15 bp, Homo sapiens
gatgacagataactt

SEQ ID NO: 2115302 - DNA, 15 bp, Homo sapiens
atgacagataacttt

SEQ ID NO: 2115303 - DNA, 15 bp, Homo sapiens
tgacagataactttg

SEQ ID NO: 2115304 - DNA, 15 bp, Homo sapiens
gacagataactttgt

SEQ ID NO: 2115305 - DNA, 15 bp, Homo sapiens
acagataactttgtg

SEQ ID NO: 2115306 - DNA, 15 bp, Homo sapiens
cagataactttgtgc

SEQ ID NO: 2115307 - DNA, 15 bp, Homo sapiens
agataactttgtgcc

SEQ ID NO: 2115308 - DNA, 15 bp, Homo sapiens
gataactttgtgcca

SEQ ID NO: 2115309 - DNA, 15 bp, Homo sapiens
ataactttgtgccat

SEQ ID NO: 2115310 - DNA, 15 bp, Homo sapiens
taactttgtgccatt

SEQ ID NO: 2115311 - DNA, 15 bp, Homo sapiens
aactttgtgccattt

SEQ ID NO: 2115312 - DNA, 15 bp, Homo sapiens
actttgtgccatttt

SEQ ID NO: 2115313 - DNA, 15 bp, Homo sapiens
ctttgtgccattttt

SEQ ID NO: 2115314 - DNA, 15 bp, Homo sapiens
tttgtgccattttta

SEQ ID NO: 2115315 - DNA, 15 bp, Homo sapiens
ttgtgccatttttag

SEQ ID NO: 2115316 - DNA, 15 bp, Homo sapiens
tgtgccatttttagt

SEQ ID NO: 2115317 - DNA, 15 bp, Homo sapiens
gtgccatttttagtc

SEQ ID NO: 2115318 - DNA, 15 bp, Homo sapiens
tgccatttttagtca

SEQ ID NO: 2115319 - DNA, 15 bp, Homo sapiens
gccatttttagtcag

SEQ ID NO: 2115320 - DNA, 15 bp, Homo sapiens
ccatttttagtcagg

SEQ ID NO: 2115321 - DNA, 15 bp, Homo sapiens
catttttagtcaggt

SEQ ID NO: 2115322 - DNA, 15 bp, Homo sapiens
tgctatagtcccact

SEQ ID NO: 2115323 - DNA, 15 bp, Homo sapiens
gctatagtcccactc

SEQ ID NO: 2115324 - DNA, 15 bp, Homo sapiens
ctatagtcccactcc

SEQ ID NO: 2115325 - DNA, 15 bp, Homo sapiens
tatagtcccactcca

SEQ ID NO: 2115326 - DNA, 15 bp, Homo sapiens
atagtcccactccaa

SEQ ID NO: 2115327 - DNA, 15 bp, Homo sapiens
tagtcccactccaaa

SEQ ID NO: 2115328 - DNA, 15 bp, Homo sapiens
agtcccactccaaac

SEQ ID NO: 2115329 - DNA, 15 bp, Homo sapiens
gtcccactccaaaca

SEQ ID NO: 2115330 - DNA, 15 bp, Homo sapiens
tcccactccaaacac

SEQ ID NO: 2115331 - DNA, 15 bp, Homo sapiens
cccactccaaacacc

SEQ ID NO: 2115332 - DNA, 15 bp, Homo sapiens
ccactccaaacaccc

SEQ ID NO: 2115333 - DNA, 15 bp, Homo sapiens
cactccaaacacccg

SEQ ID NO: 2115334 - DNA, 15 bp, Homo sapiens
actccaaacacccga

SEQ ID NO: 2115335 - DNA, 15 bp, Homo sapiens
ctccaaacacccgaa

SEQ ID NO: 2115336 - DNA, 15 bp, Homo sapiens
tccaaacacccgaac

SEQ ID NO: 2115337 - DNA, 15 bp, Homo sapiens
ccaaacacccgaaca

SEQ ID NO: 2115338 - DNA, 15 bp, Homo sapiens
caaacacccgaacac

SEQ ID NO: 2115339 - DNA, 15 bp, Homo sapiens
aaacacccgaacaca

SEQ ID NO: 2115340 - DNA, 15 bp, Homo sapiens
aacacccgaacacat

SEQ ID NO: 2115341 - DNA, 15 bp, Homo sapiens
acacccgaacacatg

SEQ ID NO: 2115342 - DNA, 15 bp, Homo sapiens
cacccgaacacatgc

SEQ ID NO: 2115343 - DNA, 15 bp, Homo sapiens
acccgaacacatgca

SEQ ID NO: 2115344 - DNA, 15 bp, Homo sapiens
cccgaacacatgcaa

SEQ ID NO: 2115345 - DNA, 15 bp, Homo sapiens
ccgaacacatgcaac

SEQ ID NO: 2115346 - DNA, 15 bp, Homo sapiens
cgaacacatgcaacc

SEQ ID NO: 2115347 - DNA, 15 bp, Homo sapiens
gaacacatgcaaccc

SEQ ID NO: 2115348 - DNA, 15 bp, Homo sapiens
aacacatgcaacccg

SEQ ID NO: 2115349 - DNA, 15 bp, Homo sapiens
acacatgcaacccgc

SEQ ID NO: 2115350 - DNA, 15 bp, Homo sapiens
cacatgcaacccgct

SEQ ID NO: 2115351 - DNA, 15 bp, Homo sapiens
acatgcaacccgcta

SEQ ID NO: 2115352 - DNA, 15 bp, Homo sapiens
catgcaacccgctac

SEQ ID NO: 2115353 - DNA, 15 bp, Homo sapiens
atgcaacccgctacc

SEQ ID NO: 2115354 - DNA, 15 bp, Homo sapiens
tgcaacccgctaccc

SEQ ID NO: 2115355 - DNA, 15 bp, Homo sapiens
gcaacccgctaccct

SEQ ID NO: 2115356 - DNA, 15 bp, Homo sapiens
caacccgctaccctc

SEQ ID NO: 2115357 - DNA, 15 bp, Homo sapiens
aacccgctaccctct

SEQ ID NO: 2115358 - DNA, 15 bp, Homo sapiens
acccgctaccctctt

SEQ ID NO: 2115359 - DNA, 15 bp, Homo sapiens
cccgctaccctcttt

SEQ ID NO: 2115360 - DNA, 15 bp, Homo sapiens
ccgctaccctcttta

SEQ ID NO: 2115361 - DNA, 15 bp, Homo sapiens
cgctaccctctttac

SEQ ID NO: 2115362 - DNA, 15 bp, Homo sapiens
gctaccctctttaca

SEQ ID NO: 2115363 - DNA, 15 bp, Homo sapiens
ctaccctctttacat

SEQ ID NO: 2115364 - DNA, 15 bp, Homo sapiens
taccctctttacatc

SEQ ID NO: 2115365 - DNA, 15 bp, Homo sapiens
accctctttacatca

SEQ ID NO: 2115366 - DNA, 15 bp, Homo sapiens
ccctctttacatcat

SEQ ID NO: 2115367 - DNA, 15 bp, Homo sapiens
cctctttacatcatc

SEQ ID NO: 2115368 - DNA, 15 bp, Homo sapiens
ctctttacatcatca

SEQ ID NO: 2115369 - DNA, 15 bp, Homo sapiens
tctttacatcatcac

SEQ ID NO: 2115370 - DNA, 15 bp, Homo sapiens
ctttacatcatcact

SEQ ID NO: 2115371 - DNA, 15 bp, Homo sapiens
tttacatcatcactt

SEQ ID NO: 2115372 - DNA, 15 bp, Homo sapiens
ttacatcatcacttt

SEQ ID NO: 2115373 - DNA, 15 bp, Homo sapiens
tacatcatcacttta

SEQ ID NO: 2115374 - DNA, 15 bp, Homo sapiens
acatcatcactttaa

SEQ ID NO: 2115375 - DNA, 15 bp, Homo sapiens
catcatcactttaac

SEQ ID NO: 2115376 - DNA, 15 bp, Homo sapiens
atcatcactttaacc

SEQ ID NO: 2115377 - DNA, 15 bp, Homo sapiens
tcatcactttaacca

SEQ ID NO: 2115378 - DNA, 15 bp, Homo sapiens
catcactttaaccag

SEQ ID NO: 2115379 - DNA, 15 bp, Homo sapiens
atcactttaaccagt

SEQ ID NO: 2115380 - DNA, 15 bp, Homo sapiens
tcactttaaccagtt

SEQ ID NO: 2115381 - DNA, 15 bp, Homo sapiens
cactttaaccagtta

SEQ ID NO: 2115382 - DNA, 15 bp, Homo sapiens
actttaaccagttaa

SEQ ID NO: 2115383 - DNA, 15 bp, Homo sapiens
ctttaaccagttaat

SEQ ID NO: 2115384 - DNA, 15 bp, Homo sapiens
tttaaccagttaatc

SEQ ID NO: 2115385 - DNA, 15 bp, Homo sapiens
ttaaccagttaatct

SEQ ID NO: 2115386 - DNA, 15 bp, Homo sapiens
taaccagttaatctc

SEQ ID NO: 2115387 - DNA, 15 bp, Homo sapiens
aaccagttaatctca

SEQ ID NO: 2115388 - DNA, 15 bp, Homo sapiens
accagttaatctcac

SEQ ID NO: 2115389 - DNA, 15 bp, Homo sapiens
ccagttaatctcaca

SEQ ID NO: 2115390 - DNA, 15 bp, Homo sapiens
cagttaatctcacac

SEQ ID NO: 2115391 - DNA, 15 bp, Homo sapiens
agttaatctcacacc

SEQ ID NO: 2115392 - DNA, 15 bp, Homo sapiens
gttaatctcacaccc

SEQ ID NO: 2115393 - DNA, 15 bp, Homo sapiens
ttaatctcacaccca

SEQ ID NO: 2115394 - DNA, 15 bp, Homo sapiens
taatctcacacccag

SEQ ID NO: 2115395 - DNA, 15 bp, Homo sapiens
aatctcacacccagt

SEQ ID NO: 2115396 - DNA, 15 bp, Homo sapiens
atctcacacccagtt

SEQ ID NO: 2115397 - DNA, 15 bp, Homo sapiens
tctcacacccagttg

SEQ ID NO: 2115398 - DNA, 15 bp, Homo sapiens
ctcacacccagttgc

SEQ ID NO: 2115399 - DNA, 15 bp, Homo sapiens
tcacacccagttgct

SEQ ID NO: 2115400 - DNA, 15 bp, Homo sapiens
cacacccagttgctt

SEQ ID NO: 2115401 - DNA, 15 bp, Homo sapiens
acacccagttgcttc

SEQ ID NO: 2115402 - DNA, 15 bp, Homo sapiens
cacccagttgcttcc

SEQ ID NO: 2115403 - DNA, 15 bp, Homo sapiens
acccagttgcttccc

SEQ ID NO: 2115404 - DNA, 15 bp, Homo sapiens
cccagttgcttccca

SEQ ID NO: 2115405 - DNA, 15 bp, Homo sapiens
ccagttgcttcccag

SEQ ID NO: 2115406 - DNA, 15 bp, Homo sapiens
cagttgcttcccagg

SEQ ID NO: 2115407 - DNA, 15 bp, Homo sapiens
agttgcttcccaggt

SEQ ID NO: 2115408 - DNA, 15 bp, Homo sapiens
gttgcttcccaggtt

SEQ ID NO: 2115409 - DNA, 15 bp, Homo sapiens
ttgcttcccaggtta

SEQ ID NO: 2115410 - DNA, 15 bp, Homo sapiens
tgcttcccaggttag

SEQ ID NO: 2115411 - DNA, 15 bp, Homo sapiens
gcttcccaggttagt

SEQ ID NO: 2115412 - DNA, 15 bp, Homo sapiens
cttcccaggttagtt

SEQ ID NO: 2115413 - DNA, 15 bp, Homo sapiens
ttcccaggttagtta

SEQ ID NO: 2115414 - DNA, 15 bp, Homo sapiens
tcccaggttagttag

SEQ ID NO: 2115415 - DNA, 15 bp, Homo sapiens
cccaggttagttagg

SEQ ID NO: 2115416 - DNA, 15 bp, Homo sapiens
ccaggttagttagga

SEQ ID NO: 2115417 - DNA, 15 bp, Homo sapiens
caggttagttaggaa

SEQ ID NO: 2115418 - DNA, 15 bp, Homo sapiens
aggttagttaggaag

SEQ ID NO: 2115419 - DNA, 15 bp, Homo sapiens
ggttagttaggaagc

SEQ ID NO: 2115420 - DNA, 15 bp, Homo sapiens
gttagttaggaagct

SEQ ID NO: 2115421 - DNA, 15 bp, Homo sapiens
ttagttaggaagctg

SEQ ID NO: 2115422 - DNA, 15 bp, Homo sapiens
tagttaggaagctgt

SEQ ID NO: 2115423 - DNA, 15 bp, Homo sapiens
agttaggaagctgtt

SEQ ID NO: 2115424 - DNA, 15 bp, Homo sapiens
gttaggaagctgttt

SEQ ID NO: 2115425 - DNA, 15 bp, Homo sapiens
ttaggaagctgtttt

SEQ ID NO: 2115426 - DNA, 15 bp, Homo sapiens
taggaagctgttttt

SEQ ID NO: 2115427 - DNA, 15 bp, Homo sapiens
aggaagctgttttta

SEQ ID NO: 2115428 - DNA, 15 bp, Homo sapiens
ggaagctgtttttac

SEQ ID NO: 2115429 - DNA, 15 bp, Homo sapiens
gaagctgtttttacc

SEQ ID NO: 2115430 - DNA, 15 bp, Homo sapiens
aagctgtttttacca

SEQ ID NO: 2115431 - DNA, 15 bp, Homo sapiens
agctgtttttaccaa

SEQ ID NO: 2115432 - DNA, 15 bp, Homo sapiens
gctgtttttaccaaa

SEQ ID NO: 2115433 - DNA, 15 bp, Homo sapiens
ctgtttttaccaaat

SEQ ID NO: 2115434 - DNA, 15 bp, Homo sapiens
tgtttttaccaaatc

SEQ ID NO: 2115435 - DNA, 15 bp, Homo sapiens
gtttttaccaaatca

SEQ ID NO: 2115436 - DNA, 15 bp, Homo sapiens
tttttaccaaatcat

SEQ ID NO: 2115437 - DNA, 15 bp, Homo sapiens
ttttaccaaatcata

SEQ ID NO: 2115438 - DNA, 15 bp, Homo sapiens
tttaccaaatcatat

SEQ ID NO: 2115439 - DNA, 15 bp, Homo sapiens
ttaccaaatcatatg

SEQ ID NO: 2115440 - DNA, 15 bp, Homo sapiens
taccaaatcatatgc

SEQ ID NO: 2115441 - DNA, 15 bp, Homo sapiens
accaaatcatatgca

SEQ ID NO: 2115442 - DNA, 15 bp, Homo sapiens
ccaaatcatatgcag

SEQ ID NO: 2115443 - DNA, 15 bp, Homo sapiens
caaatcatatgcaga

SEQ ID NO: 2115444 - DNA, 15 bp, Homo sapiens
aaatcatatgcagaa

SEQ ID NO: 2115445 - DNA, 15 bp, Homo sapiens
aatcatatgcagaat

SEQ ID NO: 2115446 - DNA, 15 bp, Homo sapiens
atcatatgcagaata

SEQ ID NO: 2115447 - DNA, 15 bp, Homo sapiens
tcatatgcagaataa

SEQ ID NO: 2115448 - DNA, 15 bp, Homo sapiens
catatgcagaataat

SEQ ID NO: 2115449 - DNA, 15 bp, Homo sapiens
atatgcagaataatg

SEQ ID NO: 2115450 - DNA, 15 bp, Homo sapiens
tatgcagaataatga

SEQ ID NO: 2115451 - DNA, 15 bp, Homo sapiens
atgcagaataatgat

SEQ ID NO: 2115452 - DNA, 15 bp, Homo sapiens
tgcagaataatgatg

SEQ ID NO: 2115453 - DNA, 15 bp, Homo sapiens
gcagaataatgatga

SEQ ID NO: 2115454 - DNA, 15 bp, Homo sapiens
cagaataatgatgaa

SEQ ID NO: 2115455 - DNA, 15 bp, Homo sapiens
agaataatgatgaat

SEQ ID NO: 2115456 - DNA, 15 bp, Homo sapiens
gaataatgatgaata

SEQ ID NO: 2115457 - DNA, 15 bp, Homo sapiens
aataatgatgaatac

SEQ ID NO: 2115458 - DNA, 15 bp, Homo sapiens
ataatgatgaatacg

SEQ ID NO: 2115459 - DNA, 15 bp, Homo sapiens
taatgatgaatacga

SEQ ID NO: 2115460 - DNA, 15 bp, Homo sapiens
aatgatgaatacgac

SEQ ID NO: 2115461 - DNA, 15 bp, Homo sapiens
atgatgaatacgacc

SEQ ID NO: 2115462 - DNA, 15 bp, Homo sapiens
tgatgaatacgacct

SEQ ID NO: 2115463 - DNA, 15 bp, Homo sapiens
gatgaatacgacctc

SEQ ID NO: 2115464 - DNA, 15 bp, Homo sapiens
atgaatacgacctca

SEQ ID NO: 2115465 - DNA, 15 bp, Homo sapiens
tgaatacgacctcag

SEQ ID NO: 2115466 - DNA, 15 bp, Homo sapiens
gaatacgacctcagt

SEQ ID NO: 2115467 - DNA, 15 bp, Homo sapiens
aatacgacctcagtg

SEQ ID NO: 2115468 - DNA, 15 bp, Homo sapiens
atacgacctcagtga

SEQ ID NO: 2115469 - DNA, 15 bp, Homo sapiens
tacgacctcagtgaa

SEQ ID NO: 2115470 - DNA, 15 bp, Homo sapiens
acgacctcagtgaaa

SEQ ID NO: 2115471 - DNA, 15 bp, Homo sapiens
cgacctcagtgaaac

SEQ ID NO: 2115472 - DNA, 15 bp, Homo sapiens
gacctcagtgaaaca

SEQ ID NO: 2115473 - DNA, 15 bp, Homo sapiens
acctcagtgaaacac

SEQ ID NO: 2115474 - DNA, 15 bp, Homo sapiens
cctcagtgaaacact

SEQ ID NO: 2115475 - DNA, 15 bp, Homo sapiens
ctcagtgaaacacta

SEQ ID NO: 2115476 - DNA, 15 bp, Homo sapiens
tcagtgaaacactaa

SEQ ID NO: 2115477 - DNA, 15 bp, Homo sapiens
cagtgaaacactaag

SEQ ID NO: 2115478 - DNA, 15 bp, Homo sapiens
agtgaaacactaagt

SEQ ID NO: 2115479 - DNA, 15 bp, Homo sapiens
gtgaaacactaagtg

SEQ ID NO: 2115480 - DNA, 15 bp, Homo sapiens
tgaaacactaagtgc

SEQ ID NO: 2115481 - DNA, 15 bp, Homo sapiens
gaaacactaagtgca

SEQ ID NO: 2115482 - DNA, 15 bp, Homo sapiens
aaacactaagtgcaa

SEQ ID NO: 2115483 - DNA, 15 bp, Homo sapiens
aacactaagtgcaat

SEQ ID NO: 2115484 - DNA, 15 bp, Homo sapiens
acactaagtgcaatg

SEQ ID NO: 2115485 - DNA, 15 bp, Homo sapiens
cactaagtgcaatgt

SEQ ID NO: 2115486 - DNA, 15 bp, Homo sapiens
actaagtgcaatgta

SEQ ID NO: 2115487 - DNA, 15 bp, Homo sapiens
ctaagtgcaatgtat

SEQ ID NO: 2115488 - DNA, 15 bp, Homo sapiens
taagtgcaatgtata

SEQ ID NO: 2115489 - DNA, 15 bp, Homo sapiens
aagtgcaatgtatac

SEQ ID NO: 2115490 - DNA, 15 bp, Homo sapiens
agtgcaatgtatact

SEQ ID NO: 2115491 - DNA, 15 bp, Homo sapiens
gtgcaatgtatactg

SEQ ID NO: 2115492 - DNA, 15 bp, Homo sapiens
tgcaatgtatactgg

SEQ ID NO: 2115493 - DNA, 15 bp, Homo sapiens
gcaatgtatactgga

SEQ ID NO: 2115494 - DNA, 15 bp, Homo sapiens
caatgtatactggaa

SEQ ID NO: 2115495 - DNA, 15 bp, Homo sapiens
aatgtatactggaaa

SEQ ID NO: 2115496 - DNA, 15 bp, Homo sapiens
atgtatactggaaaa

SEQ ID NO: 2115497 - DNA, 15 bp, Homo sapiens
tgtatactggaaaac

SEQ ID NO: 2115498 - DNA, 15 bp, Homo sapiens
gtatactggaaaaca

SEQ ID NO: 2115499 - DNA, 15 bp, Homo sapiens
tatactggaaaacaa

SEQ ID NO: 2115500 - DNA, 15 bp, Homo sapiens
atactggaaaacaaa

SEQ ID NO: 2115501 - DNA, 15 bp, Homo sapiens
tactggaaaacaaaa

SEQ ID NO: 2115502 - DNA, 15 bp, Homo sapiens
actggaaaacaaaat

SEQ ID NO: 2115503 - DNA, 15 bp, Homo sapiens
ctggaaaacaaaatc

SEQ ID NO: 2115504 - DNA, 15 bp, Homo sapiens
tggaaaacaaaatca

SEQ ID NO: 2115505 - DNA, 15 bp, Homo sapiens
ggaaaacaaaatcaa

SEQ ID NO: 2115506 - DNA, 15 bp, Homo sapiens
gaaaacaaaatcaaa

SEQ ID NO: 2115507 - DNA, 15 bp, Homo sapiens
aaaacaaaatcaaaa

SEQ ID NO: 2115508 - DNA, 15 bp, Homo sapiens
aaacaaaatcaaaat

SEQ ID NO: 2115509 - DNA, 15 bp, Homo sapiens
aacaaaatcaaaatt

SEQ ID NO: 2115510 - DNA, 15 bp, Homo sapiens
acaaaatcaaaatta

SEQ ID NO: 2115511 - DNA, 15 bp, Homo sapiens
caaaatcaaaattaa

SEQ ID NO: 2115512 - DNA, 15 bp, Homo sapiens
aaaatcaaaattaag

SEQ ID NO: 2115513 - DNA, 15 bp, Homo sapiens
aaatcaaaattaaga

SEQ ID NO: 2115514 - DNA, 15 bp, Homo sapiens
aatcaaaattaagac

SEQ ID NO: 2115515 - DNA, 15 bp, Homo sapiens
atcaaaattaagact

SEQ ID NO: 2115516 - DNA, 15 bp, Homo sapiens
tcaaaattaagacta

SEQ ID NO: 2115517 - DNA, 15 bp, Homo sapiens
caaaattaagactac

SEQ ID NO: 2115518 - DNA, 15 bp, Homo sapiens
aaaattaagactact

SEQ ID NO: 2115519 - DNA, 15 bp, Homo sapiens
aaattaagactactt

SEQ ID NO: 2115520 - DNA, 15 bp, Homo sapiens
aattaagactactta

SEQ ID NO: 2115521 - DNA, 15 bp, Homo sapiens
attaagactacttat

SEQ ID NO: 2115522 - DNA, 15 bp, Homo sapiens
ttaagactacttatt

SEQ ID NO: 2115523 - DNA, 15 bp, Homo sapiens
taagactacttatta

SEQ ID NO: 2115524 - DNA, 15 bp, Homo sapiens
aagactacttattat

SEQ ID NO: 2115525 - DNA, 15 bp, Homo sapiens
agactacttattatg

SEQ ID NO: 2115526 - DNA, 15 bp, Homo sapiens
gactacttattatgc

SEQ ID NO: 2115527 - DNA, 15 bp, Homo sapiens
actacttattatgct

SEQ ID NO: 2115528 - DNA, 15 bp, Homo sapiens
ctacttattatgctt

SEQ ID NO: 2115529 - DNA, 15 bp, Homo sapiens
tacttattatgcttt

SEQ ID NO: 2115530 - DNA, 15 bp, Homo sapiens
acttattatgctttt

SEQ ID NO: 2115531 - DNA, 15 bp, Homo sapiens
cttattatgctttta

SEQ ID NO: 2115532 - DNA, 15 bp, Homo sapiens
ttattatgcttttag

SEQ ID NO: 2115533 - DNA, 15 bp, Homo sapiens
tattatgcttttagg

SEQ ID NO: 2115534 - DNA, 15 bp, Homo sapiens
attatgcttttaggg

SEQ ID NO: 2115535 - DNA, 15 bp, Homo sapiens
ttatgcttttaggga

SEQ ID NO: 2115536 - DNA, 15 bp, Homo sapiens
tatgcttttagggac

SEQ ID NO: 2115537 - DNA, 15 bp, Homo sapiens
atgcttttagggaca

SEQ ID NO: 2115538 - DNA, 15 bp, Homo sapiens
tgcttttagggacag

SEQ ID NO: 2115539 - DNA, 15 bp, Homo sapiens
gcttttagggacagc

SEQ ID NO: 2115540 - DNA, 15 bp, Homo sapiens
cttttagggacagct

SEQ ID NO: 2115541 - DNA, 15 bp, Homo sapiens
ttttagggacagctt

SEQ ID NO: 2115542 - DNA, 15 bp, Homo sapiens
tttagggacagctta

SEQ ID NO: 2115543 - DNA, 15 bp, Homo sapiens
ttagggacagcttac

SEQ ID NO: 2115544 - DNA, 15 bp, Homo sapiens
tagggacagcttacg

SEQ ID NO: 2115545 - DNA, 15 bp, Homo sapiens
agggacagcttacgc

SEQ ID NO: 2115546 - DNA, 15 bp, Homo sapiens
gggacagcttacgca

SEQ ID NO: 2115547 - DNA, 15 bp, Homo sapiens
ggacagcttacgcac

SEQ ID NO: 2115548 - DNA, 15 bp, Homo sapiens
gacagcttacgcacc

SEQ ID NO: 2115549 - DNA, 15 bp, Homo sapiens
acagcttacgcacct

SEQ ID NO: 2115550 - DNA, 15 bp, Homo sapiens
cagcttacgcacctt

SEQ ID NO: 2115551 - DNA, 15 bp, Homo sapiens
agcttacgcaccttg

SEQ ID NO: 2115552 - DNA, 15 bp, Homo sapiens
gcttacgcaccttga

SEQ ID NO: 2115553 - DNA, 15 bp, Homo sapiens
cttacgcaccttgac

SEQ ID NO: 2115554 - DNA, 15 bp, Homo sapiens
ttacgcaccttgacg

SEQ ID NO: 2115555 - DNA, 15 bp, Homo sapiens
tacgcaccttgacgt

SEQ ID NO: 2115556 - DNA, 15 bp, Homo sapiens
acgcaccttgacgtg

SEQ ID NO: 2115557 - DNA, 15 bp, Homo sapiens
cgcaccttgacgtgt

SEQ ID NO: 2115558 - DNA, 15 bp, Homo sapiens
gcaccttgacgtgtg

SEQ ID NO: 2115559 - DNA, 15 bp, Homo sapiens
caccttgacgtgtgg

SEQ ID NO: 2115560 - DNA, 15 bp, Homo sapiens
accttgacgtgtggt

SEQ ID NO: 2115561 - DNA, 15 bp, Homo sapiens
ccttgacgtgtggtg

SEQ ID NO: 2115562 - DNA, 15 bp, Homo sapiens
cttgacgtgtggtgg

SEQ ID NO: 2115563 - DNA, 15 bp, Homo sapiens
ttgacgtgtggtggt

SEQ ID NO: 2115564 - DNA, 15 bp, Homo sapiens
tgacgtgtggtggtt

SEQ ID NO: 2115565 - DNA, 15 bp, Homo sapiens
gacgtgtggtggttg

SEQ ID NO: 2115566 - DNA, 15 bp, Homo sapiens
acgtgtggtggttgt

SEQ ID NO: 2115567 - DNA, 15 bp, Homo sapiens
cgtgtggtggttgtt

SEQ ID NO: 2115568 - DNA, 15 bp, Homo sapiens
gtgtggtggttgttt

SEQ ID NO: 2115569 - DNA, 15 bp, Homo sapiens
tgtggtggttgtttt

SEQ ID NO: 2115570 - DNA, 15 bp, Homo sapiens
gtggtggttgttttt

SEQ ID NO: 2115571 - DNA, 15 bp, Homo sapiens
tggtggttgtttttg

SEQ ID NO: 2115572 - DNA, 15 bp, Homo sapiens
ggtggttgtttttga

SEQ ID NO: 2115573 - DNA, 15 bp, Homo sapiens
gtggttgtttttgag

SEQ ID NO: 2115574 - DNA, 15 bp, Homo sapiens
tggttgtttttgaga

SEQ ID NO: 2115575 - DNA, 15 bp, Homo sapiens
ggttgtttttgagac

SEQ ID NO: 2115576 - DNA, 15 bp, Homo sapiens
gttgtttttgagact

SEQ ID NO: 2115577 - DNA, 15 bp, Homo sapiens
ttgtttttgagactt

SEQ ID NO: 2115578 - DNA, 15 bp, Homo sapiens
tgtttttgagacttt

SEQ ID NO: 2115579 - DNA, 15 bp, Homo sapiens
gtttttgagacttta

SEQ ID NO: 2115580 - DNA, 15 bp, Homo sapiens
tttttgagactttat

SEQ ID NO: 2115581 - DNA, 15 bp, Homo sapiens
ttttgagactttatc

SEQ ID NO: 2115582 - DNA, 15 bp, Homo sapiens
tgagactttatcttc

SEQ ID NO: 2115583 - DNA, 15 bp, Homo sapiens
gagactttatcttcc

SEQ ID NO: 2115584 - DNA, 15 bp, Homo sapiens
agactttatcttcct

SEQ ID NO: 2115585 - DNA, 15 bp, Homo sapiens
gactttatcttccta

SEQ ID NO: 2115586 - DNA, 15 bp, Homo sapiens
actttatcttcctat

SEQ ID NO: 2115587 - DNA, 15 bp, Homo sapiens
ctttatcttcctatc

SEQ ID NO: 2115588 - DNA, 15 bp, Homo sapiens
tttatcttcctatct

SEQ ID NO: 2115589 - DNA, 15 bp, Homo sapiens
ttatcttcctatctg

SEQ ID NO: 2115590 - DNA, 15 bp, Homo sapiens
tatcttcctatctgg

SEQ ID NO: 2115591 - DNA, 15 bp, Homo sapiens
atcttcctatctggg

SEQ ID NO: 2115592 - DNA, 15 bp, Homo sapiens
tcttcctatctggga

SEQ ID NO: 2115593 - DNA, 15 bp, Homo sapiens
cttcctatctgggac

SEQ ID NO: 2115594 - DNA, 15 bp, Homo sapiens
ttcctatctgggacc

SEQ ID NO: 2115595 - DNA, 15 bp, Homo sapiens
tcctatctgggacca

SEQ ID NO: 2115596 - DNA, 15 bp, Homo sapiens
gtaaaacaacaagcc

SEQ ID NO: 2115597 - DNA, 15 bp, Homo sapiens
taaaacaacaagcct

SEQ ID NO: 2115598 - DNA, 15 bp, Homo sapiens
aaaacaacaagccta

SEQ ID NO: 2115599 - DNA, 15 bp, Homo sapiens
aaacaacaagcctat

SEQ ID NO: 2115600 - DNA, 15 bp, Homo sapiens
aacaacaagcctatt

SEQ ID NO: 2115601 - DNA, 15 bp, Homo sapiens
acaacaagcctattc

SEQ ID NO: 2115602 - DNA, 15 bp, Homo sapiens
caacaagcctattct

SEQ ID NO: 2115603 - DNA, 15 bp, Homo sapiens
aacaagcctattctt

SEQ ID NO: 2115604 - DNA, 15 bp, Homo sapiens
acaagcctattcttc

SEQ ID NO: 2115605 - DNA, 15 bp, Homo sapiens
caagcctattcttct

SEQ ID NO: 2115606 - DNA, 15 bp, Homo sapiens
aagcctattcttctg

SEQ ID NO: 2115607 - DNA, 15 bp, Homo sapiens
agcctattcttctga

SEQ ID NO: 2115608 - DNA, 15 bp, Homo sapiens
gcctattcttctgag

SEQ ID NO: 2115609 - DNA, 15 bp, Homo sapiens
cctattcttctgagg

SEQ ID NO: 2115610 - DNA, 15 bp, Homo sapiens
ctattcttctgagga

SEQ ID NO: 2115611 - DNA, 15 bp, Homo sapiens
tattcttctgaggaa

SEQ ID NO: 2115612 - DNA, 15 bp, Homo sapiens
attcttctgaggaag

SEQ ID NO: 2115613 - DNA, 15 bp, Homo sapiens
ttcttctgaggaaga

SEQ ID NO: 2115614 - DNA, 15 bp, Homo sapiens
tcttctgaggaagat

SEQ ID NO: 2115615 - DNA, 15 bp, Homo sapiens
cttctgaggaagatc

SEQ ID NO: 2115616 - DNA, 15 bp, Homo sapiens
ttctgaggaagatct

SEQ ID NO: 2115617 - DNA, 15 bp, Homo sapiens
tctgaggaagatctg

SEQ ID NO: 2115618 - DNA, 15 bp, Homo sapiens
ctgaggaagatctga

SEQ ID NO: 2115619 - DNA, 15 bp, Homo sapiens
tgaggaagatctgaa

SEQ ID NO: 2115620 - DNA, 15 bp, Homo sapiens
gaggaagatctgaaa

SEQ ID NO: 2115621 - DNA, 15 bp, Homo sapiens
aggaagatctgaaaa

SEQ ID NO: 2115622 - DNA, 15 bp, Homo sapiens
ggaagatctgaaaag

SEQ ID NO: 2115623 - DNA, 15 bp, Homo sapiens
gaagatctgaaaaga

SEQ ID NO: 2115624 - DNA, 15 bp, Homo sapiens
aagatctgaaaagag

SEQ ID NO: 2115625 - DNA, 15 bp, Homo sapiens
agatctgaaaagaga

SEQ ID NO: 2115626 - DNA, 15 bp, Homo sapiens
gatctgaaaagagat

SEQ ID NO: 2115627 - DNA, 15 bp, Homo sapiens
atctgaaaagagata

SEQ ID NO: 2115628 - DNA, 15 bp, Homo sapiens
tctgaaaagagataa

SEQ ID NO: 2115629 - DNA, 15 bp, Homo sapiens
ctgaaaagagataaa

SEQ ID NO: 2115630 - DNA, 15 bp, Homo sapiens
tgaaaagagataaaa

SEQ ID NO: 2115631 - DNA, 15 bp, Homo sapiens
gaaaagagataaaag

SEQ ID NO: 2115632 - DNA, 15 bp, Homo sapiens
aagagataaaagaaa

SEQ ID NO: 2115633 - DNA, 15 bp, Homo sapiens
agagataaaagaaaa

SEQ ID NO: 2115634 - DNA, 15 bp, Homo sapiens
gagataaaagaaaaa

SEQ ID NO: 2115635 - DNA, 15 bp, Homo sapiens
agataaaagaaaaag

SEQ ID NO: 2115636 - DNA, 15 bp, Homo sapiens
gataaaagaaaaagt

SEQ ID NO: 2115637 - DNA, 15 bp, Homo sapiens
ataaaagaaaaagta

SEQ ID NO: 2115638 - DNA, 15 bp, Homo sapiens
taaaagaaaaagtat

SEQ ID NO: 2115639 - DNA, 15 bp, Homo sapiens
aaaagaaaaagtatt

SEQ ID NO: 2115640 - DNA, 15 bp, Homo sapiens
aaagaaaaagtattg

SEQ ID NO: 2115641 - DNA, 15 bp, Homo sapiens
aagaaaaagtattga

SEQ ID NO: 2115642 - DNA, 15 bp, Homo sapiens
agaaaaagtattgaa

SEQ ID NO: 2115643 - DNA, 15 bp, Homo sapiens
gaaaaagtattgaaa

SEQ ID NO: 2115644 - DNA, 15 bp, Homo sapiens
aaaaagtattgaaat

SEQ ID NO: 2115645 - DNA, 15 bp, Homo sapiens
aaaagtattgaaatg

SEQ ID NO: 2115646 - DNA, 15 bp, Homo sapiens
aaagtattgaaatgc

SEQ ID NO: 2115647 - DNA, 15 bp, Homo sapiens
aagtattgaaatgca

SEQ ID NO: 2115648 - DNA, 15 bp, Homo sapiens
agtattgaaatgcag

SEQ ID NO: 2115649 - DNA, 15 bp, Homo sapiens
gtattgaaatgcagt

SEQ ID NO: 2115650 - DNA, 15 bp, Homo sapiens
tattgaaatgcagta

SEQ ID NO: 2115651 - DNA, 15 bp, Homo sapiens
attgaaatgcagtac

SEQ ID NO: 2115652 - DNA, 15 bp, Homo sapiens
ttgaaatgcagtaca

SEQ ID NO: 2115653 - DNA, 15 bp, Homo sapiens
tgaaatgcagtacac

SEQ ID NO: 2115654 - DNA, 15 bp, Homo sapiens
gaaatgcagtacact

SEQ ID NO: 2115655 - DNA, 15 bp, Homo sapiens
aaatgcagtacactg

SEQ ID NO: 2115656 - DNA, 15 bp, Homo sapiens
aatgcagtacactgg

SEQ ID NO: 2115657 - DNA, 15 bp, Homo sapiens
atgcagtacactggg

SEQ ID NO: 2115658 - DNA, 15 bp, Homo sapiens
tgcagtacactggga

SEQ ID NO: 2115659 - DNA, 15 bp, Homo sapiens
gcagtacactgggaa

SEQ ID NO: 2115660 - DNA, 15 bp, Homo sapiens
cagtacactgggaaa

SEQ ID NO: 2115661 - DNA, 15 bp, Homo sapiens
agtacactgggaaag

SEQ ID NO: 2115662 - DNA, 15 bp, Homo sapiens
gtacactgggaaagt

SEQ ID NO: 2115663 - DNA, 15 bp, Homo sapiens
tacactgggaaagtc

SEQ ID NO: 2115664 - DNA, 15 bp, Homo sapiens
acactgggaaagtct

SEQ ID NO: 2115665 - DNA, 15 bp, Homo sapiens
cactgggaaagtctg

SEQ ID NO: 2115666 - DNA, 15 bp, Homo sapiens
actgggaaagtctgt

SEQ ID NO: 2115667 - DNA, 15 bp, Homo sapiens
ctgggaaagtctgtt

SEQ ID NO: 2115668 - DNA, 15 bp, Homo sapiens
tgggaaagtctgttc

SEQ ID NO: 2115669 - DNA, 15 bp, Homo sapiens
gggaaagtctgttct

SEQ ID NO: 2115670 - DNA, 15 bp, Homo sapiens
ggaaagtctgttcta

SEQ ID NO: 2115671 - DNA, 15 bp, Homo sapiens
gaaagtctgttctaa

SEQ ID NO: 2115672 - DNA, 15 bp, Homo sapiens
aaagtctgttctaat

SEQ ID NO: 2115673 - DNA, 15 bp, Homo sapiens
aagtctgttctaatg

SEQ ID NO: 2115674 - DNA, 15 bp, Homo sapiens
agtctgttctaatgg

SEQ ID NO: 2115675 - DNA, 15 bp, Homo sapiens
gtctgttctaatggg

SEQ ID NO: 2115676 - DNA, 15 bp, Homo sapiens
tctgttctaatgggc

SEQ ID NO: 2115677 - DNA, 15 bp, Homo sapiens
ctgttctaatgggca

SEQ ID NO: 2115678 - DNA, 15 bp, Homo sapiens
tgttctaatgggcaa

SEQ ID NO: 2115679 - DNA, 15 bp, Homo sapiens
gttctaatgggcaac

SEQ ID NO: 2115680 - DNA, 15 bp, Homo sapiens
ttctaatgggcaact

SEQ ID NO: 2115681 - DNA, 15 bp, Homo sapiens
tctaatgggcaacta

SEQ ID NO: 2115682 - DNA, 15 bp, Homo sapiens
ctaatgggcaactag

SEQ ID NO: 2115683 - DNA, 15 bp, Homo sapiens
taatgggcaactagt

SEQ ID NO: 2115684 - DNA, 15 bp, Homo sapiens
aatgggcaactagtg

SEQ ID NO: 2115685 - DNA, 15 bp, Homo sapiens
atgggcaactagtgg

SEQ ID NO: 2115686 - DNA, 15 bp, Homo sapiens
tgggcaactagtggt

SEQ ID NO: 2115687 - DNA, 15 bp, Homo sapiens
gggcaactagtggtt

SEQ ID NO: 2115688 - DNA, 15 bp, Homo sapiens
ggcaactagtggttg

SEQ ID NO: 2115689 - DNA, 15 bp, Homo sapiens
gcaactagtggttga

SEQ ID NO: 2115690 - DNA, 15 bp, Homo sapiens
caactagtggttgag

SEQ ID NO: 2115691 - DNA, 15 bp, Homo sapiens
aactagtggttgagt

SEQ ID NO: 2115692 - DNA, 15 bp, Homo sapiens
actagtggttgagtt

SEQ ID NO: 2115693 - DNA, 15 bp, Homo sapiens
ctagtggttgagttc

SEQ ID NO: 2115694 - DNA, 15 bp, Homo sapiens
tagtggttgagttca

SEQ ID NO: 2115695 - DNA, 15 bp, Homo sapiens
agtggttgagttcaa

SEQ ID NO: 2115696 - DNA, 15 bp, Homo sapiens
gtggttgagttcaac

SEQ ID NO: 2115697 - DNA, 15 bp, Homo sapiens
tggttgagttcaacc

SEQ ID NO: 2115698 - DNA, 15 bp, Homo sapiens
ggttgagttcaacca

SEQ ID NO: 2115699 - DNA, 15 bp, Homo sapiens
gttgagttcaaccat

SEQ ID NO: 2115700 - DNA, 15 bp, Homo sapiens
ttgagttcaaccata

SEQ ID NO: 2115701 - DNA, 15 bp, Homo sapiens
tgagttcaaccatat

SEQ ID NO: 2115702 - DNA, 15 bp, Homo sapiens
gagttcaaccatatt

SEQ ID NO: 2115703 - DNA, 15 bp, Homo sapiens
agttcaaccatattt

SEQ ID NO: 2115704 - DNA, 15 bp, Homo sapiens
gttcaaccatatttt

SEQ ID NO: 2115705 - DNA, 15 bp, Homo sapiens
ttcaaccatattttt

SEQ ID NO: 2115706 - DNA, 15 bp, Homo sapiens
tcaaccatattttta

SEQ ID NO: 2115707 - DNA, 15 bp, Homo sapiens
caaccatatttttac

SEQ ID NO: 2115708 - DNA, 15 bp, Homo sapiens
aaccatatttttacc

SEQ ID NO: 2115709 - DNA, 15 bp, Homo sapiens
accatatttttaccc

SEQ ID NO: 2115710 - DNA, 15 bp, Homo sapiens
ccatatttttaccct

SEQ ID NO: 2115711 - DNA, 15 bp, Homo sapiens
catatttttaccctt

SEQ ID NO: 2115712 - DNA, 15 bp, Homo sapiens
atatttttacccttt

SEQ ID NO: 2115713 - DNA, 15 bp, Homo sapiens
tatttttaccctttt

SEQ ID NO: 2115714 - DNA, 15 bp, Homo sapiens
atttttacccttttc

SEQ ID NO: 2115715 - DNA, 15 bp, Homo sapiens
tttttacccttttct

SEQ ID NO: 2115716 - DNA, 15 bp, Homo sapiens
ttttacccttttctt

SEQ ID NO: 2115717 - DNA, 15 bp, Homo sapiens
tttacccttttcttc

SEQ ID NO: 2115718 - DNA, 15 bp, Homo sapiens
ttacccttttcttca

SEQ ID NO: 2115719 - DNA, 15 bp, Homo sapiens
tacccttttcttcat

SEQ ID NO: 2115720 - DNA, 15 bp, Homo sapiens
acccttttcttcatg

SEQ ID NO: 2115721 - DNA, 15 bp, Homo sapiens
cccttttcttcatgt

SEQ ID NO: 2115722 - DNA, 15 bp, Homo sapiens
ccttttcttcatgtg

SEQ ID NO: 2115723 - DNA, 15 bp, Homo sapiens
cttttcttcatgtgg

SEQ ID NO: 2115724 - DNA, 15 bp, Homo sapiens
ttttcttcatgtgga

SEQ ID NO: 2115725 - DNA, 15 bp, Homo sapiens
tttcttcatgtggat

SEQ ID NO: 2115726 - DNA, 15 bp, Homo sapiens
ttcttcatgtggatt

SEQ ID NO: 2115727 - DNA, 15 bp, Homo sapiens
tcttcatgtggattg

SEQ ID NO: 2115728 - DNA, 15 bp, Homo sapiens
cttcatgtggattga

SEQ ID NO: 2115729 - DNA, 15 bp, Homo sapiens
ttcatgtggattgaa

SEQ ID NO: 2115730 - DNA, 15 bp, Homo sapiens
tcatgtggattgaag

SEQ ID NO: 2115731 - DNA, 15 bp, Homo sapiens
catgtggattgaaga

SEQ ID NO: 2115732 - DNA, 15 bp, Homo sapiens
atgtggattgaagag

SEQ ID NO: 2115733 - DNA, 15 bp, Homo sapiens
tgtggattgaagagt

SEQ ID NO: 2115734 - DNA, 15 bp, Homo sapiens
gtggattgaagagtg

SEQ ID NO: 2115735 - DNA, 15 bp, Homo sapiens
tggattgaagagtgg

SEQ ID NO: 2115736 - DNA, 15 bp, Homo sapiens
ggattgaagagtgga

SEQ ID NO: 2115737 - DNA, 15 bp, Homo sapiens
gattgaagagtggac

SEQ ID NO: 2115738 - DNA, 15 bp, Homo sapiens
attgaagagtggaca

SEQ ID NO: 2115739 - DNA, 15 bp, Homo sapiens
ttgaagagtggacat

SEQ ID NO: 2115740 - DNA, 15 bp, Homo sapiens
tgaagagtggacatt

SEQ ID NO: 2115741 - DNA, 15 bp, Homo sapiens
gaagagtggacattt

SEQ ID NO: 2115742 - DNA, 15 bp, Homo sapiens
aagagtggacattta

SEQ ID NO: 2115743 - DNA, 15 bp, Homo sapiens
agagtggacatttac

SEQ ID NO: 2115744 - DNA, 15 bp, Homo sapiens
gagtggacatttaca

SEQ ID NO: 2115745 - DNA, 15 bp, Homo sapiens
agtggacatttacag

SEQ ID NO: 2115746 - DNA, 15 bp, Homo sapiens
gtggacatttacagt

SEQ ID NO: 2115747 - DNA, 15 bp, Homo sapiens
tggacatttacagtt

SEQ ID NO: 2115748 - DNA, 15 bp, Homo sapiens
ggacatttacagttg

SEQ ID NO: 2115749 - DNA, 15 bp, Homo sapiens
gacatttacagttgt

SEQ ID NO: 2115750 - DNA, 15 bp, Homo sapiens
acatttacagttgtg

SEQ ID NO: 2115751 - DNA, 15 bp, Homo sapiens
catttacagttgtgc

SEQ ID NO: 2115752 - DNA, 15 bp, Homo sapiens
atttacagttgtgcg

SEQ ID NO: 2115753 - DNA, 15 bp, Homo sapiens
tttacagttgtgcgg

SEQ ID NO: 2115754 - DNA, 15 bp, Homo sapiens
ttacagttgtgcgga

SEQ ID NO: 2115755 - DNA, 15 bp, Homo sapiens
tacagttgtgcggag

SEQ ID NO: 2115756 - DNA, 15 bp, Homo sapiens
acagttgtgcggagc

SEQ ID NO: 2115757 - DNA, 15 bp, Homo sapiens
cagttgtgcggagct

SEQ ID NO: 2115758 - DNA, 15 bp, Homo sapiens
agttgtgcggagctg

SEQ ID NO: 2115759 - DNA, 15 bp, Homo sapiens
gttgtgcggagctgt

SEQ ID NO: 2115760 - DNA, 15 bp, Homo sapiens
ttgtgcggagctgtt

SEQ ID NO: 2115761 - DNA, 15 bp, Homo sapiens
tgtgcggagctgtta

SEQ ID NO: 2115762 - DNA, 15 bp, Homo sapiens
gtgcggagctgttat

SEQ ID NO: 2115763 - DNA, 15 bp, Homo sapiens
tgcggagctgttata

SEQ ID NO: 2115764 - DNA, 15 bp, Homo sapiens
gcggagctgttatat

SEQ ID NO: 2115765 - DNA, 15 bp, Homo sapiens
cggagctgttatatt

SEQ ID NO: 2115766 - DNA, 15 bp, Homo sapiens
ggagctgttatattc

SEQ ID NO: 2115767 - DNA, 15 bp, Homo sapiens
gagctgttatattct

SEQ ID NO: 2115768 - DNA, 15 bp, Homo sapiens
agctgttatattctg

SEQ ID NO: 2115769 - DNA, 15 bp, Homo sapiens
gctgttatattctgg

SEQ ID NO: 2115770 - DNA, 15 bp, Homo sapiens
ctgttatattctggc

SEQ ID NO: 2115771 - DNA, 15 bp, Homo sapiens
tgttatattctggct

SEQ ID NO: 2115772 - DNA, 15 bp, Homo sapiens
gttatattctggcta

SEQ ID NO: 2115773 - DNA, 15 bp, Homo sapiens
ttatattctggctac

SEQ ID NO: 2115774 - DNA, 15 bp, Homo sapiens
tatattctggctacc

SEQ ID NO: 2115775 - DNA, 15 bp, Homo sapiens
atattctggctacca

SEQ ID NO: 2115776 - DNA, 15 bp, Homo sapiens
tattctggctaccaa

SEQ ID NO: 2115777 - DNA, 15 bp, Homo sapiens
attctggctaccaac

SEQ ID NO: 2115778 - DNA, 15 bp, Homo sapiens
ttctggctaccaact

SEQ ID NO: 2115779 - DNA, 15 bp, Homo sapiens
tctggctaccaactt

SEQ ID NO: 2115780 - DNA, 15 bp, Homo sapiens
ctggctaccaactta

SEQ ID NO: 2115781 - DNA, 15 bp, Homo sapiens
tggctaccaacttag

SEQ ID NO: 2115782 - DNA, 15 bp, Homo sapiens
ggctaccaacttagc

SEQ ID NO: 2115783 - DNA, 15 bp, Homo sapiens
gctaccaacttagca

SEQ ID NO: 2115784 - DNA, 15 bp, Homo sapiens
ctaccaacttagcaa

SEQ ID NO: 2115785 - DNA, 15 bp, Homo sapiens
taccaacttagcaaa

SEQ ID NO: 2115786 - DNA, 15 bp, Homo sapiens
accaacttagcaaaa

SEQ ID NO: 2115787 - DNA, 15 bp, Homo sapiens
ccaacttagcaaaaa

SEQ ID NO: 2115788 - DNA, 15 bp, Homo sapiens
caacttagcaaaaaa

SEQ ID NO: 2115789 - DNA, 15 bp, Homo sapiens
aacttagcaaaaaaa

SEQ ID NO: 2115790 - DNA, 15 bp, Homo sapiens
acttagcaaaaaaaa

SEQ ID NO: 2115791 - DNA, 15 bp, Homo sapiens
cttagcaaaaaaaaa

SEQ ID NO: 2115792 - DNA, 15 bp, Homo sapiens
ttagcaaaaaaaaaa

SEQ ID NO: 2115793 - DNA, 15 bp, Homo sapiens
tagcaaaaaaaaaaa

SEQ ID NO: 2115794 - DNA, 15 bp, Homo sapiens
aaaaaaaaattatcc

SEQ ID NO: 2115795 - DNA, 15 bp, Homo sapiens
aaaaaaaattatcct

SEQ ID NO: 2115796 - DNA, 15 bp, Homo sapiens
aaaaaaattatccta

SEQ ID NO: 2115797 - DNA, 15 bp, Homo sapiens
aaaaaattatcctat

SEQ ID NO: 2115798 - DNA, 15 bp, Homo sapiens
aaaaattatcctatt

SEQ ID NO: 2115799 - DNA, 15 bp, Homo sapiens
aaaattatcctattc

SEQ ID NO: 2115800 - DNA, 15 bp, Homo sapiens
aaattatcctattca

SEQ ID NO: 2115801 - DNA, 15 bp, Homo sapiens
aattatcctattcat

SEQ ID NO: 2115802 - DNA, 15 bp, Homo sapiens
attatcctattcatt

SEQ ID NO: 2115803 - DNA, 15 bp, Homo sapiens
ttatcctattcattc

SEQ ID NO: 2115804 - DNA, 15 bp, Homo sapiens
tatcctattcattcc

SEQ ID NO: 2115805 - DNA, 15 bp, Homo sapiens
atcctattcattcca

SEQ ID NO: 2115806 - DNA, 15 bp, Homo sapiens
tcctattcattccag

SEQ ID NO: 2115807 - DNA, 15 bp, Homo sapiens
cctattcattccagc

SEQ ID NO: 2115808 - DNA, 15 bp, Homo sapiens
ctattcattccagct

SEQ ID NO: 2115809 - DNA, 15 bp, Homo sapiens
tattcattccagctc

SEQ ID NO: 2115810 - DNA, 15 bp, Homo sapiens
attcattccagctct

SEQ ID NO: 2115811 - DNA, 15 bp, Homo sapiens
ttcattccagctcta

SEQ ID NO: 2115812 - DNA, 15 bp, Homo sapiens
tcattccagctctat

SEQ ID NO: 2115813 - DNA, 15 bp, Homo sapiens
cattccagctctatt

SEQ ID NO: 2115814 - DNA, 15 bp, Homo sapiens
attccagctctattc

SEQ ID NO: 2115815 - DNA, 15 bp, Homo sapiens
ttccagctctattct

SEQ ID NO: 2115816 - DNA, 15 bp, Homo sapiens
tccagctctattctg

SEQ ID NO: 2115817 - DNA, 15 bp, Homo sapiens
ccagctctattctgt

SEQ ID NO: 2115818 - DNA, 15 bp, Homo sapiens
cagctctattctgta

SEQ ID NO: 2115819 - DNA, 15 bp, Homo sapiens
agctctattctgtat

SEQ ID NO: 2115820 - DNA, 15 bp, Homo sapiens
gctctattctgtatg

SEQ ID NO: 2115821 - DNA, 15 bp, Homo sapiens
ctctattctgtatgc

SEQ ID NO: 2115822 - DNA, 15 bp, Homo sapiens
tctattctgtatgct

SEQ ID NO: 2115823 - DNA, 15 bp, Homo sapiens
ctattctgtatgctt

SEQ ID NO: 2115824 - DNA, 15 bp, Homo sapiens
tattctgtatgcttt

SEQ ID NO: 2115825 - DNA, 15 bp, Homo sapiens
attctgtatgctttc

SEQ ID NO: 2115826 - DNA, 15 bp, Homo sapiens
ttctgtatgctttcc

SEQ ID NO: 2115827 - DNA, 15 bp, Homo sapiens
tctgtatgctttccc

SEQ ID NO: 2115828 - DNA, 15 bp, Homo sapiens
ctgtatgctttccct

SEQ ID NO: 2115829 - DNA, 15 bp, Homo sapiens
tgtatgctttccctc

SEQ ID NO: 2115830 - DNA, 15 bp, Homo sapiens
gtatgctttccctca

SEQ ID NO: 2115831 - DNA, 15 bp, Homo sapiens
tatgctttccctcat

SEQ ID NO: 2115832 - DNA, 15 bp, Homo sapiens
atgctttccctcatt

SEQ ID NO: 2115833 - DNA, 15 bp, Homo sapiens
tgctttccctcattt

SEQ ID NO: 2115834 - DNA, 15 bp, Homo sapiens
gctttccctcatttc

SEQ ID NO: 2115835 - DNA, 15 bp, Homo sapiens
ctttccctcatttcc

SEQ ID NO: 2115836 - DNA, 15 bp, Homo sapiens
tttccctcatttcca

SEQ ID NO: 2115837 - DNA, 15 bp, Homo sapiens
ttccctcatttccaa

SEQ ID NO: 2115838 - DNA, 15 bp, Homo sapiens
tccctcatttccaag

SEQ ID NO: 2115839 - DNA, 15 bp, Homo sapiens
ccctcatttccaaga

SEQ ID NO: 2115840 - DNA, 15 bp, Homo sapiens
cctcatttccaagag

SEQ ID NO: 2115841 - DNA, 15 bp, Homo sapiens
ctcatttccaagaga

SEQ ID NO: 2115842 - DNA, 15 bp, Homo sapiens
tcatttccaagagaa

SEQ ID NO: 2115843 - DNA, 15 bp, Homo sapiens
catttccaagagaaa

SEQ ID NO: 2115844 - DNA, 15 bp, Homo sapiens
atttccaagagaaat

SEQ ID NO: 2115845 - DNA, 15 bp, Homo sapiens
tttccaagagaaatt

SEQ ID NO: 2115846 - DNA, 15 bp, Homo sapiens
ttccaagagaaattt

SEQ ID NO: 2115847 - DNA, 15 bp, Homo sapiens
tccaagagaaattta

SEQ ID NO: 2115848 - DNA, 15 bp, Homo sapiens
ccaagagaaatttag

SEQ ID NO: 2115849 - DNA, 15 bp, Homo sapiens
caagagaaatttaga

SEQ ID NO: 2115850 - DNA, 15 bp, Homo sapiens
aagagaaatttagaa

SEQ ID NO: 2115851 - DNA, 15 bp, Homo sapiens
agagaaatttagaac

SEQ ID NO: 2115852 - DNA, 15 bp, Homo sapiens
gagaaatttagaact

SEQ ID NO: 2115853 - DNA, 15 bp, Homo sapiens
agaaatttagaactg

SEQ ID NO: 2115854 - DNA, 15 bp, Homo sapiens
gaaatttagaactga

SEQ ID NO: 2115855 - DNA, 15 bp, Homo sapiens
aaatttagaactgag

SEQ ID NO: 2115856 - DNA, 15 bp, Homo sapiens
aatttagaactgagt

SEQ ID NO: 2115857 - DNA, 15 bp, Homo sapiens
atttagaactgagta

SEQ ID NO: 2115858 - DNA, 15 bp, Homo sapiens
tttagaactgagtaa

SEQ ID NO: 2115859 - DNA, 15 bp, Homo sapiens
ttagaactgagtaat

SEQ ID NO: 2115860 - DNA, 15 bp, Homo sapiens
tagaactgagtaatt

SEQ ID NO: 2115861 - DNA, 15 bp, Homo sapiens
agaactgagtaattg

SEQ ID NO: 2115862 - DNA, 15 bp, Homo sapiens
gaactgagtaattgc

SEQ ID NO: 2115863 - DNA, 15 bp, Homo sapiens
aactgagtaattgcc

SEQ ID NO: 2115864 - DNA, 15 bp, Homo sapiens
actgagtaattgcca

SEQ ID NO: 2115865 - DNA, 15 bp, Homo sapiens
ctgagtaattgccaa

SEQ ID NO: 2115866 - DNA, 15 bp, Homo sapiens
tgagtaattgccaat

SEQ ID NO: 2115867 - DNA, 15 bp, Homo sapiens
gagtaattgccaata

SEQ ID NO: 2115868 - DNA, 15 bp, Homo sapiens
agtaattgccaatat

SEQ ID NO: 2115869 - DNA, 15 bp, Homo sapiens
gtaattgccaatatt

SEQ ID NO: 2115870 - DNA, 15 bp, Homo sapiens
taattgccaatattc

SEQ ID NO: 2115871 - DNA, 15 bp, Homo sapiens
aattgccaatattcc

SEQ ID NO: 2115872 - DNA, 15 bp, Homo sapiens
attgccaatattccc

SEQ ID NO: 2115873 - DNA, 15 bp, Homo sapiens
ttgccaatattccca

SEQ ID NO: 2115874 - DNA, 15 bp, Homo sapiens
tgccaatattcccat

SEQ ID NO: 2115875 - DNA, 15 bp, Homo sapiens
gccaatattcccatg

SEQ ID NO: 2115876 - DNA, 15 bp, Homo sapiens
ccaatattcccatgc

SEQ ID NO: 2115877 - DNA, 15 bp, Homo sapiens
caatattcccatgct

SEQ ID NO: 2115878 - DNA, 15 bp, Homo sapiens
aatattcccatgctg

SEQ ID NO: 2115879 - DNA, 15 bp, Homo sapiens
atattcccatgctgc

SEQ ID NO: 2115880 - DNA, 15 bp, Homo sapiens
tattcccatgctgca

SEQ ID NO: 2115881 - DNA, 15 bp, Homo sapiens
attcccatgctgcat

SEQ ID NO: 2115882 - DNA, 15 bp, Homo sapiens
ttcccatgctgcatt

SEQ ID NO: 2115883 - DNA, 15 bp, Homo sapiens
tcccatgctgcattt

SEQ ID NO: 2115884 - DNA, 15 bp, Homo sapiens
cccatgctgcatttt

SEQ ID NO: 2115885 - DNA, 15 bp, Homo sapiens
ccatgctgcatttta

SEQ ID NO: 2115886 - DNA, 15 bp, Homo sapiens
catgctgcattttat

SEQ ID NO: 2115887 - DNA, 15 bp, Homo sapiens
atgctgcattttatt

SEQ ID NO: 2115888 - DNA, 15 bp, Homo sapiens
tgctgcattttattc

SEQ ID NO: 2115889 - DNA, 15 bp, Homo sapiens
gctgcattttattct

SEQ ID NO: 2115890 - DNA, 15 bp, Homo sapiens
ctgcattttattctc

SEQ ID NO: 2115891 - DNA, 15 bp, Homo sapiens
tgcattttattctcc

SEQ ID NO: 2115892 - DNA, 15 bp, Homo sapiens
gcattttattctcca

SEQ ID NO: 2115893 - DNA, 15 bp, Homo sapiens
cattttattctccag

SEQ ID NO: 2115894 - DNA, 15 bp, Homo sapiens
attttattctccagt

SEQ ID NO: 2115895 - DNA, 15 bp, Homo sapiens
ttttattctccagtc

SEQ ID NO: 2115896 - DNA, 15 bp, Homo sapiens
tttattctccagtct

SEQ ID NO: 2115897 - DNA, 15 bp, Homo sapiens
ttattctccagtctt

SEQ ID NO: 2115898 - DNA, 15 bp, Homo sapiens
tattctccagtcttt

SEQ ID NO: 2115899 - DNA, 15 bp, Homo sapiens
attctccagtcttta

SEQ ID NO: 2115900 - DNA, 15 bp, Homo sapiens
ttctccagtctttat

SEQ ID NO: 2115901 - DNA, 15 bp, Homo sapiens
tctccagtctttatt

SEQ ID NO: 2115902 - DNA, 15 bp, Homo sapiens
ctccagtctttatta

SEQ ID NO: 2115903 - DNA, 15 bp, Homo sapiens
tccagtctttattac

SEQ ID NO: 2115904 - DNA, 15 bp, Homo sapiens
ccagtctttattact

SEQ ID NO: 2115905 - DNA, 15 bp, Homo sapiens
cagtctttattactg

SEQ ID NO: 2115906 - DNA, 15 bp, Homo sapiens
agtctttattactga

SEQ ID NO: 2115907 - DNA, 15 bp, Homo sapiens
gtctttattactgag

SEQ ID NO: 2115908 - DNA, 15 bp, Homo sapiens
tctttattactgagc

SEQ ID NO: 2115909 - DNA, 15 bp, Homo sapiens
ctttattactgagcg

SEQ ID NO: 2115910 - DNA, 15 bp, Homo sapiens
tttattactgagcga

SEQ ID NO: 2115911 - DNA, 15 bp, Homo sapiens
ttattactgagcgat

SEQ ID NO: 2115912 - DNA, 15 bp, Homo sapiens
tattactgagcgatc

SEQ ID NO: 2115913 - DNA, 15 bp, Homo sapiens
attactgagcgatcc

SEQ ID NO: 2115914 - DNA, 15 bp, Homo sapiens
ttactgagcgatcct

SEQ ID NO: 2115915 - DNA, 15 bp, Homo sapiens
tactgagcgatcctc

SEQ ID NO: 2115916 - DNA, 15 bp, Homo sapiens
actgagcgatcctct

SEQ ID NO: 2115917 - DNA, 15 bp, Homo sapiens
ctgagcgatcctcta

SEQ ID NO: 2115918 - DNA, 15 bp, Homo sapiens
tgagcgatcctctac

SEQ ID NO: 2115919 - DNA, 15 bp, Homo sapiens
gagcgatcctctaca

SEQ ID NO: 2115920 - DNA, 15 bp, Homo sapiens
agcgatcctctacaa

SEQ ID NO: 2115921 - DNA, 15 bp, Homo sapiens
gcgatcctctacaat

SEQ ID NO: 2115922 - DNA, 15 bp, Homo sapiens
cgatcctctacaatg

SEQ ID NO: 2115923 - DNA, 15 bp, Homo sapiens
gatcctctacaatgt

SEQ ID NO: 2115924 - DNA, 15 bp, Homo sapiens
atcctctacaatgtg

SEQ ID NO: 2115925 - DNA, 15 bp, Homo sapiens
tcctctacaatgtgg

SEQ ID NO: 2115926 - DNA, 15 bp, Homo sapiens
cctctacaatgtggg

SEQ ID NO: 2115927 - DNA, 15 bp, Homo sapiens
ctctacaatgtgggt

SEQ ID NO: 2115928 - DNA, 15 bp, Homo sapiens
tctacaatgtgggtt

SEQ ID NO: 2115929 - DNA, 15 bp, Homo sapiens
ctacaatgtgggttg

SEQ ID NO: 2115930 - DNA, 15 bp, Homo sapiens
tacaatgtgggttgt

SEQ ID NO: 2115931 - DNA, 15 bp, Homo sapiens
acaatgtgggttgtt

SEQ ID NO: 2115932 - DNA, 15 bp, Homo sapiens
caatgtgggttgtta

SEQ ID NO: 2115933 - DNA, 15 bp, Homo sapiens
aatgtgggttgttaa

SEQ ID NO: 2115934 - DNA, 15 bp, Homo sapiens
atgtgggttgttaat

SEQ ID NO: 2115935 - DNA, 15 bp, Homo sapiens
tgtgggttgttaata

SEQ ID NO: 2115936 - DNA, 15 bp, Homo sapiens
gtgggttgttaatac

SEQ ID NO: 2115937 - DNA, 15 bp, Homo sapiens
tgggttgttaatacc

SEQ ID NO: 2115938 - DNA, 15 bp, Homo sapiens
gggttgttaataccc

SEQ ID NO: 2115939 - DNA, 15 bp, Homo sapiens
ggttgttaataccct

SEQ ID NO: 2115940 - DNA, 15 bp, Homo sapiens
gttgttaataccctt

SEQ ID NO: 2115941 - DNA, 15 bp, Homo sapiens
ttgttaatacccttg

SEQ ID NO: 2115942 - DNA, 15 bp, Homo sapiens
tgttaatacccttgt

SEQ ID NO: 2115943 - DNA, 15 bp, Homo sapiens
gttaatacccttgtg

SEQ ID NO: 2115944 - DNA, 15 bp, Homo sapiens
ttaatacccttgtgt

SEQ ID NO: 2115945 - DNA, 15 bp, Homo sapiens
taatacccttgtgtt

SEQ ID NO: 2115946 - DNA, 15 bp, Homo sapiens
aatacccttgtgttc

SEQ ID NO: 2115947 - DNA, 15 bp, Homo sapiens
atacccttgtgttct

SEQ ID NO: 2115948 - DNA, 15 bp, Homo sapiens
tacccttgtgttctc

SEQ ID NO: 2115949 - DNA, 15 bp, Homo sapiens
acccttgtgttctca

SEQ ID NO: 2115950 - DNA, 15 bp, Homo sapiens
cccttgtgttctcag

SEQ ID NO: 2115951 - DNA, 15 bp, Homo sapiens
ccttgtgttctcagc

SEQ ID NO: 2115952 - DNA, 15 bp, Homo sapiens
cttgtgttctcagca

SEQ ID NO: 2115953 - DNA, 15 bp, Homo sapiens
ttgtgttctcagcac

SEQ ID NO: 2115954 - DNA, 15 bp, Homo sapiens
tgtgttctcagcaca

SEQ ID NO: 2115955 - DNA, 15 bp, Homo sapiens
gtgttctcagcacaa

SEQ ID NO: 2115956 - DNA, 15 bp, Homo sapiens
tgttctcagcacaaa

SEQ ID NO: 2115957 - DNA, 15 bp, Homo sapiens
gttctcagcacaaaa

SEQ ID NO: 2115958 - DNA, 15 bp, Homo sapiens
ttctcagcacaaaat

SEQ ID NO: 2115959 - DNA, 15 bp, Homo sapiens
tctcagcacaaaata

SEQ ID NO: 2115960 - DNA, 15 bp, Homo sapiens
ctcagcacaaaatat

SEQ ID NO: 2115961 - DNA, 15 bp, Homo sapiens
tcagcacaaaatata

SEQ ID NO: 2115962 - DNA, 15 bp, Homo sapiens
cagcacaaaatatag

SEQ ID NO: 2115963 - DNA, 15 bp, Homo sapiens
agcacaaaatatagt

SEQ ID NO: 2115964 - DNA, 15 bp, Homo sapiens
gcacaaaatatagta

SEQ ID NO: 2115965 - DNA, 15 bp, Homo sapiens
cacaaaatatagtag

SEQ ID NO: 2115966 - DNA, 15 bp, Homo sapiens
acaaaatatagtagg

SEQ ID NO: 2115967 - DNA, 15 bp, Homo sapiens
caaaatatagtaggg

SEQ ID NO: 2115968 - DNA, 15 bp, Homo sapiens
aaaatatagtagggg

SEQ ID NO: 2115969 - DNA, 15 bp, Homo sapiens
aaatatagtaggggg

SEQ ID NO: 2115970 - DNA, 15 bp, Homo sapiens
aatatagtagggggg

SEQ ID NO: 2115971 - DNA, 15 bp, Homo sapiens
atatagtaggggggt

SEQ ID NO: 2115972 - DNA, 15 bp, Homo sapiens
tatagtaggggggtc

SEQ ID NO: 2115973 - DNA, 15 bp, Homo sapiens
atagtaggggggtca

SEQ ID NO: 2115974 - DNA, 15 bp, Homo sapiens
tagtaggggggtcaa

SEQ ID NO: 2115975 - DNA, 15 bp, Homo sapiens
agtaggggggtcaag

SEQ ID NO: 2115976 - DNA, 15 bp, Homo sapiens
gtaggggggtcaaga

SEQ ID NO: 2115977 - DNA, 15 bp, Homo sapiens
taggggggtcaagaa

SEQ ID NO: 2115978 - DNA, 15 bp, Homo sapiens
aggggggtcaagaaa

SEQ ID NO: 2115979 - DNA, 15 bp, Homo sapiens
ggggggtcaagaaat

SEQ ID NO: 2115980 - DNA, 15 bp, Homo sapiens
gggggtcaagaaatc

SEQ ID NO: 2115981 - DNA, 15 bp, Homo sapiens
ggggtcaagaaatca

SEQ ID NO: 2115982 - DNA, 15 bp, Homo sapiens
gggtcaagaaatcaa

SEQ ID NO: 2115983 - DNA, 15 bp, Homo sapiens
ggtcaagaaatcaag

SEQ ID NO: 2115984 - DNA, 15 bp, Homo sapiens
gtcaagaaatcaaga

SEQ ID NO: 2115985 - DNA, 15 bp, Homo sapiens
tcaagaaatcaagag

SEQ ID NO: 2115986 - DNA, 15 bp, Homo sapiens
caagaaatcaagagg

SEQ ID NO: 2115987 - DNA, 15 bp, Homo sapiens
aagaaatcaagaggt

SEQ ID NO: 2115988 - DNA, 15 bp, Homo sapiens
agaaatcaagaggtt

SEQ ID NO: 2115989 - DNA, 15 bp, Homo sapiens
gaaatcaagaggttg

SEQ ID NO: 2115990 - DNA, 15 bp, Homo sapiens
aaatcaagaggttga

SEQ ID NO: 2115991 - DNA, 15 bp, Homo sapiens
aatcaagaggttgaa

SEQ ID NO: 2115992 - DNA, 15 bp, Homo sapiens
atcaagaggttgaaa

SEQ ID NO: 2115993 - DNA, 15 bp, Homo sapiens
tcaagaggttgaaac

SEQ ID NO: 2115994 - DNA, 15 bp, Homo sapiens
caagaggttgaaact

SEQ ID NO: 2115995 - DNA, 15 bp, Homo sapiens
aagaggttgaaacta

SEQ ID NO: 2115996 - DNA, 15 bp, Homo sapiens
agaggttgaaactaa

SEQ ID NO: 2115997 - DNA, 15 bp, Homo sapiens
gaggttgaaactaat

SEQ ID NO: 2115998 - DNA, 15 bp, Homo sapiens
aggttgaaactaatg

SEQ ID NO: 2115999 - DNA, 15 bp, Homo sapiens
ggttgaaactaatgg

SEQ ID NO: 2116000 - DNA, 15 bp, Homo sapiens
gttgaaactaatgga

SEQ ID NO: 2116001 - DNA, 15 bp, Homo sapiens
ttgaaactaatggaa

SEQ ID NO: 2116002 - DNA, 15 bp, Homo sapiens
tgaaactaatggaag

SEQ ID NO: 2116003 - DNA, 15 bp, Homo sapiens
gaaactaatggaagg

SEQ ID NO: 2116004 - DNA, 15 bp, Homo sapiens
aaactaatggaagga

SEQ ID NO: 2116005 - DNA, 15 bp, Homo sapiens
aactaatggaaggag

SEQ ID NO: 2116006 - DNA, 15 bp, Homo sapiens
actaatggaaggaga

SEQ ID NO: 2116007 - DNA, 15 bp, Homo sapiens
ctaatggaaggagaa

SEQ ID NO: 2116008 - DNA, 15 bp, Homo sapiens
taatggaaggagaaa

SEQ ID NO: 2116009 - DNA, 15 bp, Homo sapiens
aatggaaggagaaac

SEQ ID NO: 2116010 - DNA, 15 bp, Homo sapiens
atggaaggagaaact

SEQ ID NO: 2116011 - DNA, 15 bp, Homo sapiens
tggaaggagaaacta

SEQ ID NO: 2116012 - DNA, 15 bp, Homo sapiens
ggaaggagaaactaa

SEQ ID NO: 2116013 - DNA, 15 bp, Homo sapiens
gaaggagaaactaat

SEQ ID NO: 2116014 - DNA, 15 bp, Homo sapiens
aaggagaaactaatg

SEQ ID NO: 2116015 - DNA, 15 bp, Homo sapiens
aggagaaactaatgc

SEQ ID NO: 2116016 - DNA, 15 bp, Homo sapiens
ggagaaactaatgct

SEQ ID NO: 2116017 - DNA, 15 bp, Homo sapiens
gagaaactaatgctt

SEQ ID NO: 2116018 - DNA, 15 bp, Homo sapiens
agaaactaatgcttt

SEQ ID NO: 2116019 - DNA, 15 bp, Homo sapiens
gaaactaatgctttc

SEQ ID NO: 2116020 - DNA, 15 bp, Homo sapiens
aaactaatgctttct

SEQ ID NO: 2116021 - DNA, 15 bp, Homo sapiens
aactaatgctttctc

SEQ ID NO: 2116022 - DNA, 15 bp, Homo sapiens
actaatgctttctca

SEQ ID NO: 2116023 - DNA, 15 bp, Homo sapiens
ctaatgctttctcaa

SEQ ID NO: 2116024 - DNA, 15 bp, Homo sapiens
taatgctttctcaac

SEQ ID NO: 2116025 - DNA, 15 bp, Homo sapiens
aatgctttctcaacc

SEQ ID NO: 2116026 - DNA, 15 bp, Homo sapiens
atgctttctcaacca

SEQ ID NO: 2116027 - DNA, 15 bp, Homo sapiens
tgctttctcaaccaa

SEQ ID NO: 2116028 - DNA, 15 bp, Homo sapiens
gctttctcaaccaag

SEQ ID NO: 2116029 - DNA, 15 bp, Homo sapiens
ctttctcaaccaaga

SEQ ID NO: 2116030 - DNA, 15 bp, Homo sapiens
tttctcaaccaagag

SEQ ID NO: 2116031 - DNA, 15 bp, Homo sapiens
ttctcaaccaagaga

SEQ ID NO: 2116032 - DNA, 15 bp, Homo sapiens
tctcaaccaagagag

SEQ ID NO: 2116033 - DNA, 15 bp, Homo sapiens
ctcaaccaagagagc

SEQ ID NO: 2116034 - DNA, 15 bp, Homo sapiens
tcaaccaagagagcc

SEQ ID NO: 2116035 - DNA, 15 bp, Homo sapiens
caaccaagagagcca

SEQ ID NO: 2116036 - DNA, 15 bp, Homo sapiens
aaccaagagagccat

SEQ ID NO: 2116037 - DNA, 15 bp, Homo sapiens
accaagagagccatg

SEQ ID NO: 2116038 - DNA, 15 bp, Homo sapiens
ccaagagagccatga

SEQ ID NO: 2116039 - DNA, 15 bp, Homo sapiens
caagagagccatgaa

SEQ ID NO: 2116040 - DNA, 15 bp, Homo sapiens
aagagagccatgaag

SEQ ID NO: 2116041 - DNA, 15 bp, Homo sapiens
agagagccatgaagc

SEQ ID NO: 2116042 - DNA, 15 bp, Homo sapiens
gagagccatgaagcc

SEQ ID NO: 2116043 - DNA, 15 bp, Homo sapiens
agagccatgaagcca

SEQ ID NO: 2116044 - DNA, 15 bp, Homo sapiens
gagccatgaagccac

SEQ ID NO: 2116045 - DNA, 15 bp, Homo sapiens
agccatgaagccaca

SEQ ID NO: 2116046 - DNA, 15 bp, Homo sapiens
gccatgaagccacac

SEQ ID NO: 2116047 - DNA, 15 bp, Homo sapiens
ccatgaagccacaca

SEQ ID NO: 2116048 - DNA, 15 bp, Homo sapiens
catgaagccacacag

SEQ ID NO: 2116049 - DNA, 15 bp, Homo sapiens
atgaagccacacaga

SEQ ID NO: 2116050 - DNA, 15 bp, Homo sapiens
tgaagccacacagaa

SEQ ID NO: 2116051 - DNA, 15 bp, Homo sapiens
gaagccacacagaaa

SEQ ID NO: 2116052 - DNA, 15 bp, Homo sapiens
aagccacacagaaaa

SEQ ID NO: 2116053 - DNA, 15 bp, Homo sapiens
agccacacagaaaag

SEQ ID NO: 2116054 - DNA, 15 bp, Homo sapiens
gccacacagaaaagg

SEQ ID NO: 2116055 - DNA, 15 bp, Homo sapiens
ccacacagaaaaggt

SEQ ID NO: 2116056 - DNA, 15 bp, Homo sapiens
cacacagaaaaggtc

SEQ ID NO: 2116057 - DNA, 15 bp, Homo sapiens
acacagaaaaggtcg

SEQ ID NO: 2116058 - DNA, 15 bp, Homo sapiens
cacagaaaaggtcgg

SEQ ID NO: 2116059 - DNA, 15 bp, Homo sapiens
acagaaaaggtcgga

SEQ ID NO: 2116060 - DNA, 15 bp, Homo sapiens
cagaaaaggtcggat

SEQ ID NO: 2116061 - DNA, 15 bp, Homo sapiens
agaaaaggtcggatg

SEQ ID NO: 2116062 - DNA, 15 bp, Homo sapiens
gaaaaggtcggatgt

SEQ ID NO: 2116063 - DNA, 15 bp, Homo sapiens
aaaaggtcggatgtg

SEQ ID NO: 2116064 - DNA, 15 bp, Homo sapiens
aaaggtcggatgtgg

SEQ ID NO: 2116065 - DNA, 15 bp, Homo sapiens
aaggtcggatgtggt

SEQ ID NO: 2116066 - DNA, 15 bp, Homo sapiens
aggtcggatgtggtc

SEQ ID NO: 2116067 - DNA, 15 bp, Homo sapiens
ggtcggatgtggtct

SEQ ID NO: 2116068 - DNA, 15 bp, Homo sapiens
gtcggatgtggtcta

SEQ ID NO: 2116069 - DNA, 15 bp, Homo sapiens
tcggatgtggtctaa

SEQ ID NO: 2116070 - DNA, 15 bp, Homo sapiens
cggatgtggtctaac

SEQ ID NO: 2116071 - DNA, 15 bp, Homo sapiens
ggatgtggtctaacc

SEQ ID NO: 2116072 - DNA, 15 bp, Homo sapiens
gatgtggtctaaccc

SEQ ID NO: 2116073 - DNA, 15 bp, Homo sapiens
atgtggtctaaccct

SEQ ID NO: 2116074 - DNA, 15 bp, Homo sapiens
tgtggtctaacccta

SEQ ID NO: 2116075 - DNA, 15 bp, Homo sapiens
gtggtctaaccctat

SEQ ID NO: 2116076 - DNA, 15 bp, Homo sapiens
tggtctaaccctatg

SEQ ID NO: 2116077 - DNA, 15 bp, Homo sapiens
ggtctaaccctatga

SEQ ID NO: 2116078 - DNA, 15 bp, Homo sapiens
gtctaaccctatgag

SEQ ID NO: 2116079 - DNA, 15 bp, Homo sapiens
tctaaccctatgagt

SEQ ID NO: 2116080 - DNA, 15 bp, Homo sapiens
ctaaccctatgagtt

SEQ ID NO: 2116081 - DNA, 15 bp, Homo sapiens
taaccctatgagtta

SEQ ID NO: 2116082 - DNA, 15 bp, Homo sapiens
aaccctatgagttat

SEQ ID NO: 2116083 - DNA, 15 bp, Homo sapiens
accctatgagttatg

SEQ ID NO: 2116084 - DNA, 15 bp, Homo sapiens
ccctatgagttatgt

SEQ ID NO: 2116085 - DNA, 15 bp, Homo sapiens
cctatgagttatgta

SEQ ID NO: 2116086 - DNA, 15 bp, Homo sapiens
ctatgagttatgtaa

SEQ ID NO: 2116087 - DNA, 15 bp, Homo sapiens
tatgagttatgtaag

SEQ ID NO: 2116088 - DNA, 15 bp, Homo sapiens
atgagttatgtaaga

SEQ ID NO: 2116089 - DNA, 15 bp, Homo sapiens
tgagttatgtaagaa

SEQ ID NO: 2116090 - DNA, 15 bp, Homo sapiens
gagttatgtaagaat

SEQ ID NO: 2116091 - DNA, 15 bp, Homo sapiens
agttatgtaagaatt

SEQ ID NO: 2116092 - DNA, 15 bp, Homo sapiens
gttatgtaagaattc

SEQ ID NO: 2116093 - DNA, 15 bp, Homo sapiens
ttatgtaagaattct

SEQ ID NO: 2116094 - DNA, 15 bp, Homo sapiens
tatgtaagaattctc

SEQ ID NO: 2116095 - DNA, 15 bp, Homo sapiens
atgtaagaattctcc

SEQ ID NO: 2116096 - DNA, 15 bp, Homo sapiens
tgtaagaattctcct

SEQ ID NO: 2116097 - DNA, 15 bp, Homo sapiens
gtaagaattctcctc

SEQ ID NO: 2116098 - DNA, 15 bp, Homo sapiens
taagaattctcctcc

SEQ ID NO: 2116099 - DNA, 15 bp, Homo sapiens
aagaattctcctcca

SEQ ID NO: 2116100 - DNA, 15 bp, Homo sapiens
agaattctcctccac

SEQ ID NO: 2116101 - DNA, 15 bp, Homo sapiens
gaattctcctccaca

SEQ ID NO: 2116102 - DNA, 15 bp, Homo sapiens
aattctcctccacaa

SEQ ID NO: 2116103 - DNA, 15 bp, Homo sapiens
attctcctccacaat

SEQ ID NO: 2116104 - DNA, 15 bp, Homo sapiens
ttctcctccacaatg

SEQ ID NO: 2116105 - DNA, 15 bp, Homo sapiens
tctcctccacaatgc

SEQ ID NO: 2116106 - DNA, 15 bp, Homo sapiens
ctcctccacaatgcc

SEQ ID NO: 2116107 - DNA, 15 bp, Homo sapiens
tcctccacaatgcct

SEQ ID NO: 2116108 - DNA, 15 bp, Homo sapiens
cctccacaatgcctc

SEQ ID NO: 2116109 - DNA, 15 bp, Homo sapiens
ctccacaatgcctct

SEQ ID NO: 2116110 - DNA, 15 bp, Homo sapiens
tccacaatgcctctg

SEQ ID NO: 2116111 - DNA, 15 bp, Homo sapiens
ccacaatgcctctgg

SEQ ID NO: 2116112 - DNA, 15 bp, Homo sapiens
cacaatgcctctggc

SEQ ID NO: 2116113 - DNA, 15 bp, Homo sapiens
acaatgcctctggct

SEQ ID NO: 2116114 - DNA, 15 bp, Homo sapiens
caatgcctctggctt

SEQ ID NO: 2116115 - DNA, 15 bp, Homo sapiens
aatgcctctggcttc

SEQ ID NO: 2116116 - DNA, 15 bp, Homo sapiens
atgcctctggcttcc

SEQ ID NO: 2116117 - DNA, 15 bp, Homo sapiens
tgcctctggcttcct

SEQ ID NO: 2116118 - DNA, 15 bp, Homo sapiens
gcctctggcttcctt

SEQ ID NO: 2116119 - DNA, 15 bp, Homo sapiens
cctctggcttccttt

SEQ ID NO: 2116120 - DNA, 15 bp, Homo sapiens
ctctggcttccttta

SEQ ID NO: 2116121 - DNA, 15 bp, Homo sapiens
tctggcttcctttat

SEQ ID NO: 2116122 - DNA, 15 bp, Homo sapiens
ctggcttcctttata

SEQ ID NO: 2116123 - DNA, 15 bp, Homo sapiens
tggcttcctttataa

SEQ ID NO: 2116124 - DNA, 15 bp, Homo sapiens
ggcttcctttataaa

SEQ ID NO: 2116125 - DNA, 15 bp, Homo sapiens
gcttcctttataaag

SEQ ID NO: 2116126 - DNA, 15 bp, Homo sapiens
cttcctttataaaga

SEQ ID NO: 2116127 - DNA, 15 bp, Homo sapiens
ttcctttataaagag

SEQ ID NO: 2116128 - DNA, 15 bp, Homo sapiens
tcctttataaagagc

SEQ ID NO: 2116129 - DNA, 15 bp, Homo sapiens
cctttataaagagct

SEQ ID NO: 2116130 - DNA, 15 bp, Homo sapiens
ctttataaagagcta

SEQ ID NO: 2116131 - DNA, 15 bp, Homo sapiens
tttataaagagctat

SEQ ID NO: 2116132 - DNA, 15 bp, Homo sapiens
ttataaagagctatt

SEQ ID NO: 2116133 - DNA, 15 bp, Homo sapiens
tataaagagctattt

SEQ ID NO: 2116134 - DNA, 15 bp, Homo sapiens
ataaagagctatttt

SEQ ID NO: 2116135 - DNA, 15 bp, Homo sapiens
taaagagctatttta

SEQ ID NO: 2116136 - DNA, 15 bp, Homo sapiens
aaagagctattttaa

SEQ ID NO: 2116137 - DNA, 15 bp, Homo sapiens
aagagctattttaag

SEQ ID NO: 2116138 - DNA, 15 bp, Homo sapiens
agagctattttaaga

SEQ ID NO: 2116139 - DNA, 15 bp, Homo sapiens
gagctattttaagaa

SEQ ID NO: 2116140 - DNA, 15 bp, Homo sapiens
agctattttaagaac

SEQ ID NO: 2116141 - DNA, 15 bp, Homo sapiens
gctattttaagaact

SEQ ID NO: 2116142 - DNA, 15 bp, Homo sapiens
ctattttaagaactg

SEQ ID NO: 2116143 - DNA, 15 bp, Homo sapiens
tattttaagaactga

SEQ ID NO: 2116144 - DNA, 15 bp, Homo sapiens
attttaagaactgag

SEQ ID NO: 2116145 - DNA, 15 bp, Homo sapiens
ttttaagaactgaga

SEQ ID NO: 2116146 - DNA, 15 bp, Homo sapiens
tttaagaactgagaa

SEQ ID NO: 2116147 - DNA, 15 bp, Homo sapiens
ttaagaactgagaaa

SEQ ID NO: 2116148 - DNA, 15 bp, Homo sapiens
taagaactgagaaat

SEQ ID NO: 2116149 - DNA, 15 bp, Homo sapiens
aagaactgagaaatc

SEQ ID NO: 2116150 - DNA, 15 bp, Homo sapiens
agaactgagaaatcc

SEQ ID NO: 2116151 - DNA, 15 bp, Homo sapiens
gaactgagaaatcca

SEQ ID NO: 2116152 - DNA, 15 bp, Homo sapiens
aactgagaaatccac

SEQ ID NO: 2116153 - DNA, 15 bp, Homo sapiens
actgagaaatccacc

SEQ ID NO: 2116154 - DNA, 15 bp, Homo sapiens
ctgagaaatccacct

SEQ ID NO: 2116155 - DNA, 15 bp, Homo sapiens
tgagaaatccacctc

SEQ ID NO: 2116156 - DNA, 15 bp, Homo sapiens
gagaaatccacctct

SEQ ID NO: 2116157 - DNA, 15 bp, Homo sapiens
agaaatccacctcta

SEQ ID NO: 2116158 - DNA, 15 bp, Homo sapiens
gaaatccacctctat

SEQ ID NO: 2116159 - DNA, 15 bp, Homo sapiens
aaatccacctctatc

SEQ ID NO: 2116160 - DNA, 15 bp, Homo sapiens
aatccacctctatca

SEQ ID NO: 2116161 - DNA, 15 bp, Homo sapiens
atccacctctatcaa

SEQ ID NO: 2116162 - DNA, 15 bp, Homo sapiens
tccacctctatcaaa

SEQ ID NO: 2116163 - DNA, 15 bp, Homo sapiens
ccacctctatcaaag

SEQ ID NO: 2116164 - DNA, 15 bp, Homo sapiens
cacctctatcaaagt

SEQ ID NO: 2116165 - DNA, 15 bp, Homo sapiens
acctctatcaaagtg

SEQ ID NO: 2116166 - DNA, 15 bp, Homo sapiens
cctctatcaaagtgc

SEQ ID NO: 2116167 - DNA, 15 bp, Homo sapiens
ctctatcaaagtgcc

SEQ ID NO: 2116168 - DNA, 15 bp, Homo sapiens
tctatcaaagtgcct

SEQ ID NO: 2116169 - DNA, 15 bp, Homo sapiens
ctatcaaagtgcctg

SEQ ID NO: 2116170 - DNA, 15 bp, Homo sapiens
tatcaaagtgcctgt

SEQ ID NO: 2116171 - DNA, 15 bp, Homo sapiens
atcaaagtgcctgtc

SEQ ID NO: 2116172 - DNA, 15 bp, Homo sapiens
tcaaagtgcctgtca

SEQ ID NO: 2116173 - DNA, 15 bp, Homo sapiens
caaagtgcctgtcag

SEQ ID NO: 2116174 - DNA, 15 bp, Homo sapiens
aaagtgcctgtcagc

SEQ ID NO: 2116175 - DNA, 15 bp, Homo sapiens
aagtgcctgtcagct

SEQ ID NO: 2116176 - DNA, 15 bp, Homo sapiens
agtgcctgtcagcta

SEQ ID NO: 2116177 - DNA, 15 bp, Homo sapiens
gtgcctgtcagctag

SEQ ID NO: 2116178 - DNA, 15 bp, Homo sapiens
tgcctgtcagctagt

SEQ ID NO: 2116179 - DNA, 15 bp, Homo sapiens
gcctgtcagctagtt

SEQ ID NO: 2116180 - DNA, 15 bp, Homo sapiens
cctgtcagctagttc

SEQ ID NO: 2116181 - DNA, 15 bp, Homo sapiens
ctgtcagctagttct

SEQ ID NO: 2116182 - DNA, 15 bp, Homo sapiens
tgtcagctagttctg

SEQ ID NO: 2116183 - DNA, 15 bp, Homo sapiens
gtcagctagttctgt

SEQ ID NO: 2116184 - DNA, 15 bp, Homo sapiens
tcagctagttctgta

SEQ ID NO: 2116185 - DNA, 15 bp, Homo sapiens
cagctagttctgtag

SEQ ID NO: 2116186 - DNA, 15 bp, Homo sapiens
agctagttctgtagc

SEQ ID NO: 2116187 - DNA, 15 bp, Homo sapiens
gctagttctgtagca

SEQ ID NO: 2116188 - DNA, 15 bp, Homo sapiens
ctagttctgtagcat

SEQ ID NO: 2116189 - DNA, 15 bp, Homo sapiens
tagttctgtagcatc

SEQ ID NO: 2116190 - DNA, 15 bp, Homo sapiens
agttctgtagcatcc

SEQ ID NO: 2116191 - DNA, 15 bp, Homo sapiens
gttctgtagcatccc

SEQ ID NO: 2116192 - DNA, 15 bp, Homo sapiens
ttctgtagcatcccc

SEQ ID NO: 2116193 - DNA, 15 bp, Homo sapiens
tctgtagcatccccc

SEQ ID NO: 2116194 - DNA, 15 bp, Homo sapiens
ctgtagcatccccct

SEQ ID NO: 2116195 - DNA, 15 bp, Homo sapiens
tgtagcatccccctc

SEQ ID NO: 2116196 - DNA, 15 bp, Homo sapiens
gtagcatccccctct

SEQ ID NO: 2116197 - DNA, 15 bp, Homo sapiens
tagcatccccctctt

SEQ ID NO: 2116198 - DNA, 15 bp, Homo sapiens
agcatccccctcttt

SEQ ID NO: 2116199 - DNA, 15 bp, Homo sapiens
gcatccccctctttt

SEQ ID NO: 2116200 - DNA, 15 bp, Homo sapiens
catccccctctttta

SEQ ID NO: 2116201 - DNA, 15 bp, Homo sapiens
atccccctcttttaa

SEQ ID NO: 2116202 - DNA, 15 bp, Homo sapiens
tccccctcttttaat

SEQ ID NO: 2116203 - DNA, 15 bp, Homo sapiens
ccccctcttttaatt

SEQ ID NO: 2116204 - DNA, 15 bp, Homo sapiens
cccctcttttaattt

SEQ ID NO: 2116205 - DNA, 15 bp, Homo sapiens
ccctcttttaatttg

SEQ ID NO: 2116206 - DNA, 15 bp, Homo sapiens
cctcttttaatttgt

SEQ ID NO: 2116207 - DNA, 15 bp, Homo sapiens
ctcttttaatttgta

SEQ ID NO: 2116208 - DNA, 15 bp, Homo sapiens
tcttttaatttgtac

SEQ ID NO: 2116209 - DNA, 15 bp, Homo sapiens
cttttaatttgtact

SEQ ID NO: 2116210 - DNA, 15 bp, Homo sapiens
ttttaatttgtactt

SEQ ID NO: 2116211 - DNA, 15 bp, Homo sapiens
tttaatttgtacttt

SEQ ID NO: 2116212 - DNA, 15 bp, Homo sapiens
ttaatttgtacttta

SEQ ID NO: 2116213 - DNA, 15 bp, Homo sapiens
taatttgtactttaa

SEQ ID NO: 2116214 - DNA, 15 bp, Homo sapiens
aatttgtactttaag

SEQ ID NO: 2116215 - DNA, 15 bp, Homo sapiens
atttgtactttaagt

SEQ ID NO: 2116216 - DNA, 15 bp, Homo sapiens
tttgtactttaagta

SEQ ID NO: 2116217 - DNA, 15 bp, Homo sapiens
ttgtactttaagtag

SEQ ID NO: 2116218 - DNA, 15 bp, Homo sapiens
tgtactttaagtagt

SEQ ID NO: 2116219 - DNA, 15 bp, Homo sapiens
gtactttaagtagtg

SEQ ID NO: 2116220 - DNA, 15 bp, Homo sapiens
tactttaagtagtgc

SEQ ID NO: 2116221 - DNA, 15 bp, Homo sapiens
actttaagtagtgcc

SEQ ID NO: 2116222 - DNA, 15 bp, Homo sapiens
ctttaagtagtgcca

SEQ ID NO: 2116223 - DNA, 15 bp, Homo sapiens
tttaagtagtgccat

SEQ ID NO: 2116224 - DNA, 15 bp, Homo sapiens
ttaagtagtgccatg

SEQ ID NO: 2116225 - DNA, 15 bp, Homo sapiens
taagtagtgccatgc

SEQ ID NO: 2116226 - DNA, 15 bp, Homo sapiens
aagtagtgccatgcc

SEQ ID NO: 2116227 - DNA, 15 bp, Homo sapiens
agtagtgccatgcca

SEQ ID NO: 2116228 - DNA, 15 bp, Homo sapiens
gtagtgccatgccat

SEQ ID NO: 2116229 - DNA, 15 bp, Homo sapiens
tagtgccatgccata

SEQ ID NO: 2116230 - DNA, 15 bp, Homo sapiens
agtgccatgccataa

SEQ ID NO: 2116231 - DNA, 15 bp, Homo sapiens
gtgccatgccataat

SEQ ID NO: 2116232 - DNA, 15 bp, Homo sapiens
tgccatgccataata

SEQ ID NO: 2116233 - DNA, 15 bp, Homo sapiens
gccatgccataatat

SEQ ID NO: 2116234 - DNA, 15 bp, Homo sapiens
ccatgccataatatt

SEQ ID NO: 2116235 - DNA, 15 bp, Homo sapiens
catgccataatattg

SEQ ID NO: 2116236 - DNA, 15 bp, Homo sapiens
atgccataatattgc

SEQ ID NO: 2116237 - DNA, 15 bp, Homo sapiens
tgccataatattgcc

SEQ ID NO: 2116238 - DNA, 15 bp, Homo sapiens
gccataatattgcca

SEQ ID NO: 2116239 - DNA, 15 bp, Homo sapiens
ccataatattgccaa

SEQ ID NO: 2116240 - DNA, 15 bp, Homo sapiens
cataatattgccaag

SEQ ID NO: 2116241 - DNA, 15 bp, Homo sapiens
ataatattgccaaga

SEQ ID NO: 2116242 - DNA, 15 bp, Homo sapiens
taatattgccaagat

SEQ ID NO: 2116243 - DNA, 15 bp, Homo sapiens
aatattgccaagata

SEQ ID NO: 2116244 - DNA, 15 bp, Homo sapiens
atattgccaagataa

SEQ ID NO: 2116245 - DNA, 15 bp, Homo sapiens
tattgccaagataaa

SEQ ID NO: 2116246 - DNA, 15 bp, Homo sapiens
attgccaagataaag

SEQ ID NO: 2116247 - DNA, 15 bp, Homo sapiens
ttgccaagataaaga

SEQ ID NO: 2116248 - DNA, 15 bp, Homo sapiens
tgccaagataaagag

SEQ ID NO: 2116249 - DNA, 15 bp, Homo sapiens
gccaagataaagaga

SEQ ID NO: 2116250 - DNA, 15 bp, Homo sapiens
ccaagataaagagaa

SEQ ID NO: 2116251 - DNA, 15 bp, Homo sapiens
caagataaagagaat

SEQ ID NO: 2116252 - DNA, 15 bp, Homo sapiens
aagataaagagaatt

SEQ ID NO: 2116253 - DNA, 15 bp, Homo sapiens
agataaagagaattg

SEQ ID NO: 2116254 - DNA, 15 bp, Homo sapiens
gataaagagaattgt

SEQ ID NO: 2116255 - DNA, 15 bp, Homo sapiens
ataaagagaattgtt

SEQ ID NO: 2116256 - DNA, 15 bp, Homo sapiens
taaagagaattgttt

SEQ ID NO: 2116257 - DNA, 15 bp, Homo sapiens
aaagagaattgtttc

SEQ ID NO: 2116258 - DNA, 15 bp, Homo sapiens
aagagaattgtttcc

SEQ ID NO: 2116259 - DNA, 15 bp, Homo sapiens
agagaattgtttcct

SEQ ID NO: 2116260 - DNA, 15 bp, Homo sapiens
gagaattgtttccta

SEQ ID NO: 2116261 - DNA, 15 bp, Homo sapiens
agaattgtttcctac

SEQ ID NO: 2116262 - DNA, 15 bp, Homo sapiens
gaattgtttcctact

SEQ ID NO: 2116263 - DNA, 15 bp, Homo sapiens
aattgtttcctactc

SEQ ID NO: 2116264 - DNA, 15 bp, Homo sapiens
attgtttcctactca

SEQ ID NO: 2116265 - DNA, 15 bp, Homo sapiens
ttgtttcctactcaa

SEQ ID NO: 2116266 - DNA, 15 bp, Homo sapiens
tgtttcctactcaat

SEQ ID NO: 2116267 - DNA, 15 bp, Homo sapiens
gtttcctactcaatc

SEQ ID NO: 2116268 - DNA, 15 bp, Homo sapiens
tttcctactcaatcc

SEQ ID NO: 2116269 - DNA, 15 bp, Homo sapiens
ttcctactcaatcca

SEQ ID NO: 2116270 - DNA, 15 bp, Homo sapiens
tcctactcaatccac

SEQ ID NO: 2116271 - DNA, 15 bp, Homo sapiens
cctactcaatccaca

SEQ ID NO: 2116272 - DNA, 15 bp, Homo sapiens
ctactcaatccacat

SEQ ID NO: 2116273 - DNA, 15 bp, Homo sapiens
tactcaatccacatg

SEQ ID NO: 2116274 - DNA, 15 bp, Homo sapiens
actcaatccacatgg

SEQ ID NO: 2116275 - DNA, 15 bp, Homo sapiens
ctcaatccacatggt

SEQ ID NO: 2116276 - DNA, 15 bp, Homo sapiens
tcaatccacatggta

SEQ ID NO: 2116277 - DNA, 15 bp, Homo sapiens
caatccacatggtaa

SEQ ID NO: 2116278 - DNA, 15 bp, Homo sapiens
aatccacatggtaac

SEQ ID NO: 2116279 - DNA, 15 bp, Homo sapiens
atccacatggtaaca

SEQ ID NO: 2116280 - DNA, 15 bp, Homo sapiens
tccacatggtaacat

SEQ ID NO: 2116281 - DNA, 15 bp, Homo sapiens
ccacatggtaacatt

SEQ ID NO: 2116282 - DNA, 15 bp, Homo sapiens
cacatggtaacattt

SEQ ID NO: 2116283 - DNA, 15 bp, Homo sapiens
acatggtaacatttc

SEQ ID NO: 2116284 - DNA, 15 bp, Homo sapiens
catggtaacatttct

SEQ ID NO: 2116285 - DNA, 15 bp, Homo sapiens
atggtaacatttctt

SEQ ID NO: 2116286 - DNA, 15 bp, Homo sapiens
tggtaacatttcttc

SEQ ID NO: 2116287 - DNA, 15 bp, Homo sapiens
ggtaacatttcttca

SEQ ID NO: 2116288 - DNA, 15 bp, Homo sapiens
gtaacatttcttcaa

SEQ ID NO: 2116289 - DNA, 15 bp, Homo sapiens
taacatttcttcaac

SEQ ID NO: 2116290 - DNA, 15 bp, Homo sapiens
aacatttcttcaaca

SEQ ID NO: 2116291 - DNA, 15 bp, Homo sapiens
acatttcttcaacaa

SEQ ID NO: 2116292 - DNA, 15 bp, Homo sapiens
catttcttcaacaac

SEQ ID NO: 2116293 - DNA, 15 bp, Homo sapiens
atttcttcaacaacc

SEQ ID NO: 2116294 - DNA, 15 bp, Homo sapiens
tttcttcaacaacct

SEQ ID NO: 2116295 - DNA, 15 bp, Homo sapiens
ttcttcaacaacctg

SEQ ID NO: 2116296 - DNA, 15 bp, Homo sapiens
tcttcaacaacctgt

SEQ ID NO: 2116297 - DNA, 15 bp, Homo sapiens
cttcaacaacctgta

SEQ ID NO: 2116298 - DNA, 15 bp, Homo sapiens
ttcaacaacctgtat

SEQ ID NO: 2116299 - DNA, 15 bp, Homo sapiens
tcaacaacctgtata

SEQ ID NO: 2116300 - DNA, 15 bp, Homo sapiens
caacaacctgtataa

SEQ ID NO: 2116301 - DNA, 15 bp, Homo sapiens
aacaacctgtataat

SEQ ID NO: 2116302 - DNA, 15 bp, Homo sapiens
acaacctgtataata

SEQ ID NO: 2116303 - DNA, 15 bp, Homo sapiens
caacctgtataatag

SEQ ID NO: 2116304 - DNA, 15 bp, Homo sapiens
aacctgtataatagg

SEQ ID NO: 2116305 - DNA, 15 bp, Homo sapiens
acctgtataataggg

SEQ ID NO: 2116306 - DNA, 15 bp, Homo sapiens
cctgtataatagggc

SEQ ID NO: 2116307 - DNA, 15 bp, Homo sapiens
ctgtataatagggcg

SEQ ID NO: 2116308 - DNA, 15 bp, Homo sapiens
tgtataatagggcgc

SEQ ID NO: 2116309 - DNA, 15 bp, Homo sapiens
gtataatagggcgcc

SEQ ID NO: 2116310 - DNA, 15 bp, Homo sapiens
tataatagggcgcca

SEQ ID NO: 2116311 - DNA, 15 bp, Homo sapiens
ataatagggcgccac

SEQ ID NO: 2116312 - DNA, 15 bp, Homo sapiens
taatagggcgccacc

SEQ ID NO: 2116313 - DNA, 15 bp, Homo sapiens
aatagggcgccacca

SEQ ID NO: 2116314 - DNA, 15 bp, Homo sapiens
atagggcgccaccaa

SEQ ID NO: 2116315 - DNA, 15 bp, Homo sapiens
tagggcgccaccaaa

SEQ ID NO: 2116316 - DNA, 15 bp, Homo sapiens
agggcgccaccaaag

SEQ ID NO: 2116317 - DNA, 15 bp, Homo sapiens
gggcgccaccaaagt

SEQ ID NO: 2116318 - DNA, 15 bp, Homo sapiens
ggcgccaccaaagtt

SEQ ID NO: 2116319 - DNA, 15 bp, Homo sapiens
gcgccaccaaagttc

SEQ ID NO: 2116320 - DNA, 15 bp, Homo sapiens
cgccaccaaagttct

SEQ ID NO: 2116321 - DNA, 15 bp, Homo sapiens
gccaccaaagttcta

SEQ ID NO: 2116322 - DNA, 15 bp, Homo sapiens
ccaccaaagttctag

SEQ ID NO: 2116323 - DNA, 15 bp, Homo sapiens
caccaaagttctagg

SEQ ID NO: 2116324 - DNA, 15 bp, Homo sapiens
accaaagttctagga

SEQ ID NO: 2116325 - DNA, 15 bp, Homo sapiens
ccaaagttctaggat

SEQ ID NO: 2116326 - DNA, 15 bp, Homo sapiens
caaagttctaggata

SEQ ID NO: 2116327 - DNA, 15 bp, Homo sapiens
aaagttctaggatat

SEQ ID NO: 2116328 - DNA, 15 bp, Homo sapiens
aagttctaggatatt

SEQ ID NO: 2116329 - DNA, 15 bp, Homo sapiens
agttctaggatattc

SEQ ID NO: 2116330 - DNA, 15 bp, Homo sapiens
gttctaggatattcg

SEQ ID NO: 2116331 - DNA, 15 bp, Homo sapiens
ttctaggatattcgg

SEQ ID NO: 2116332 - DNA, 15 bp, Homo sapiens
tctaggatattcgga

SEQ ID NO: 2116333 - DNA, 15 bp, Homo sapiens
ctaggatattcggag

SEQ ID NO: 2116334 - DNA, 15 bp, Homo sapiens
taggatattcggaga

SEQ ID NO: 2116335 - DNA, 15 bp, Homo sapiens
aggatattcggagaa

SEQ ID NO: 2116336 - DNA, 15 bp, Homo sapiens
ggatattcggagaaa

SEQ ID NO: 2116337 - DNA, 15 bp, Homo sapiens
gatattcggagaaac

SEQ ID NO: 2116338 - DNA, 15 bp, Homo sapiens
atattcggagaaacc

SEQ ID NO: 2116339 - DNA, 15 bp, Homo sapiens
tattcggagaaacca

SEQ ID NO: 2116340 - DNA, 15 bp, Homo sapiens
attcggagaaaccaa

SEQ ID NO: 2116341 - DNA, 15 bp, Homo sapiens
ttcggagaaaccaag

SEQ ID NO: 2116342 - DNA, 15 bp, Homo sapiens
tcggagaaaccaaga

SEQ ID NO: 2116343 - DNA, 15 bp, Homo sapiens
cggagaaaccaagaa

SEQ ID NO: 2116344 - DNA, 15 bp, Homo sapiens
ggagaaaccaagaat

SEQ ID NO: 2116345 - DNA, 15 bp, Homo sapiens
gagaaaccaagaatg

SEQ ID NO: 2116346 - DNA, 15 bp, Homo sapiens
agaaaccaagaatgg

SEQ ID NO: 2116347 - DNA, 15 bp, Homo sapiens
gaaaccaagaatggt

SEQ ID NO: 2116348 - DNA, 15 bp, Homo sapiens
aaaccaagaatggtc

SEQ ID NO: 2116349 - DNA, 15 bp, Homo sapiens
aaccaagaatggtca

SEQ ID NO: 2116350 - DNA, 15 bp, Homo sapiens
accaagaatggtcac

SEQ ID NO: 2116351 - DNA, 15 bp, Homo sapiens
ccaagaatggtcaca

SEQ ID NO: 2116352 - DNA, 15 bp, Homo sapiens
caagaatggtcacaa

SEQ ID NO: 2116353 - DNA, 15 bp, Homo sapiens
aagaatggtcacaag

SEQ ID NO: 2116354 - DNA, 15 bp, Homo sapiens
agaatggtcacaagc

SEQ ID NO: 2116355 - DNA, 15 bp, Homo sapiens
gaatggtcacaagca

SEQ ID NO: 2116356 - DNA, 15 bp, Homo sapiens
aatggtcacaagcac

SEQ ID NO: 2116357 - DNA, 15 bp, Homo sapiens
atggtcacaagcaca

SEQ ID NO: 2116358 - DNA, 15 bp, Homo sapiens
tggtcacaagcacat

SEQ ID NO: 2116359 - DNA, 15 bp, Homo sapiens
ggtcacaagcacata

SEQ ID NO: 2116360 - DNA, 15 bp, Homo sapiens
gtcacaagcacatag

SEQ ID NO: 2116361 - DNA, 15 bp, Homo sapiens
tcacaagcacataga

SEQ ID NO: 2116362 - DNA, 15 bp, Homo sapiens
cacaagcacatagaa

SEQ ID NO: 2116363 - DNA, 15 bp, Homo sapiens
acaagcacatagaac

SEQ ID NO: 2116364 - DNA, 15 bp, Homo sapiens
caagcacatagaact

SEQ ID NO: 2116365 - DNA, 15 bp, Homo sapiens
aagcacatagaactc

SEQ ID NO: 2116366 - DNA, 15 bp, Homo sapiens
agcacatagaactcc

SEQ ID NO: 2116367 - DNA, 15 bp, Homo sapiens
gcacatagaactcca

SEQ ID NO: 2116368 - DNA, 15 bp, Homo sapiens
cacatagaactccag

SEQ ID NO: 2116369 - DNA, 15 bp, Homo sapiens
acatagaactccagt

SEQ ID NO: 2116370 - DNA, 15 bp, Homo sapiens
catagaactccagtt

SEQ ID NO: 2116371 - DNA, 15 bp, Homo sapiens
atagaactccagtta

SEQ ID NO: 2116372 - DNA, 15 bp, Homo sapiens
tagaactccagttat

SEQ ID NO: 2116373 - DNA, 15 bp, Homo sapiens
agaactccagttata

SEQ ID NO: 2116374 - DNA, 15 bp, Homo sapiens
gaactccagttataa

SEQ ID NO: 2116375 - DNA, 15 bp, Homo sapiens
aactccagttataac

SEQ ID NO: 2116376 - DNA, 15 bp, Homo sapiens
actccagttataaca

SEQ ID NO: 2116377 - DNA, 15 bp, Homo sapiens
ctccagttataacaa

SEQ ID NO: 2116378 - DNA, 15 bp, Homo sapiens
tccagttataacaac

SEQ ID NO: 2116379 - DNA, 15 bp, Homo sapiens
ccagttataacaaca

SEQ ID NO: 2116380 - DNA, 15 bp, Homo sapiens
cagttataacaacag

SEQ ID NO: 2116381 - DNA, 15 bp, Homo sapiens
agttataacaacagc

SEQ ID NO: 2116382 - DNA, 15 bp, Homo sapiens
gttataacaacagct

SEQ ID NO: 2116383 - DNA, 15 bp, Homo sapiens
ttataacaacagctg

SEQ ID NO: 2116384 - DNA, 15 bp, Homo sapiens
tataacaacagctgg

SEQ ID NO: 2116385 - DNA, 15 bp, Homo sapiens
ataacaacagctggc

SEQ ID NO: 2116386 - DNA, 15 bp, Homo sapiens
taacaacagctggcc

SEQ ID NO: 2116387 - DNA, 15 bp, Homo sapiens
aacaacagctggcca

SEQ ID NO: 2116388 - DNA, 15 bp, Homo sapiens
acaacagctggccag

SEQ ID NO: 2116389 - DNA, 15 bp, Homo sapiens
caacagctggccagg

SEQ ID NO: 2116390 - DNA, 15 bp, Homo sapiens
aacagctggccaggc

SEQ ID NO: 2116391 - DNA, 15 bp, Homo sapiens
acagctggccaggcg

SEQ ID NO: 2116392 - DNA, 15 bp, Homo sapiens
cagctggccaggcgt

SEQ ID NO: 2116393 - DNA, 15 bp, Homo sapiens
agctggccaggcgtg

SEQ ID NO: 2116394 - DNA, 15 bp, Homo sapiens
gctggccaggcgtgg

SEQ ID NO: 2116395 - DNA, 15 bp, Homo sapiens
ctggccaggcgtggt

SEQ ID NO: 2116396 - DNA, 15 bp, Homo sapiens
tggccaggcgtggtg

SEQ ID NO: 2116397 - DNA, 15 bp, Homo sapiens
ggccaggcgtggtgg

SEQ ID NO: 2116398 - DNA, 15 bp, Homo sapiens
ccaggcgtggtggct

SEQ ID NO: 2116399 - DNA, 15 bp, Homo sapiens
caggcgtggtggctc

SEQ ID NO: 2116400 - DNA, 15 bp, Homo sapiens
aggcgtggtggctca

SEQ ID NO: 2116401 - DNA, 15 bp, Homo sapiens
ctgtaatcccagcag

SEQ ID NO: 2116402 - DNA, 15 bp, Homo sapiens
tgtaatcccagcagt

SEQ ID NO: 2116403 - DNA, 15 bp, Homo sapiens
gtaatcccagcagtt

SEQ ID NO: 2116404 - DNA, 15 bp, Homo sapiens
taatcccagcagttt

SEQ ID NO: 2116405 - DNA, 15 bp, Homo sapiens
aatcccagcagtttg

SEQ ID NO: 2116406 - DNA, 15 bp, Homo sapiens
atcccagcagtttgg

SEQ ID NO: 2116407 - DNA, 15 bp, Homo sapiens
tcccagcagtttggg

SEQ ID NO: 2116408 - DNA, 15 bp, Homo sapiens
cccagcagtttggga

SEQ ID NO: 2116409 - DNA, 15 bp, Homo sapiens
ccagcagtttgggag

SEQ ID NO: 2116410 - DNA, 15 bp, Homo sapiens
cagcagtttgggagg

SEQ ID NO: 2116411 - DNA, 15 bp, Homo sapiens
agcagtttgggaggt

SEQ ID NO: 2116412 - DNA, 15 bp, Homo sapiens
gcagtttgggaggtc

SEQ ID NO: 2116413 - DNA, 15 bp, Homo sapiens
cagtttgggaggtcg

SEQ ID NO: 2116414 - DNA, 15 bp, Homo sapiens
agtttgggaggtcga

SEQ ID NO: 2116415 - DNA, 15 bp, Homo sapiens
gtttgggaggtcgag

SEQ ID NO: 2116416 - DNA, 15 bp, Homo sapiens
tgggaggtcgaggcg

SEQ ID NO: 2116417 - DNA, 15 bp, Homo sapiens
gggaggtcgaggcgg

SEQ ID NO: 2116418 - DNA, 15 bp, Homo sapiens
ggaggtcgaggcggg

SEQ ID NO: 2116419 - DNA, 15 bp, Homo sapiens
gaggtcgaggcgggt

SEQ ID NO: 2116420 - DNA, 15 bp, Homo sapiens
aggtcgaggcgggtg

SEQ ID NO: 2116421 - DNA, 15 bp, Homo sapiens
ggtcgaggcgggtga

SEQ ID NO: 2116422 - DNA, 15 bp, Homo sapiens
gtcgaggcgggtgaa

SEQ ID NO: 2116423 - DNA, 15 bp, Homo sapiens
tcgaggcgggtgaat

SEQ ID NO: 2116424 - DNA, 15 bp, Homo sapiens
cgaggcgggtgaatc

SEQ ID NO: 2116425 - DNA, 15 bp, Homo sapiens
gaggcgggtgaatca

SEQ ID NO: 2116426 - DNA, 15 bp, Homo sapiens
aggcgggtgaatcac

SEQ ID NO: 2116427 - DNA, 15 bp, Homo sapiens
ggcgggtgaatcacc

SEQ ID NO: 2116428 - DNA, 15 bp, Homo sapiens
gcgggtgaatcacct

SEQ ID NO: 2116429 - DNA, 15 bp, Homo sapiens
cgggtgaatcacctg

SEQ ID NO: 2116430 - DNA, 15 bp, Homo sapiens
gggtgaatcacctga

SEQ ID NO: 2116431 - DNA, 15 bp, Homo sapiens
ggtgaatcacctgag

SEQ ID NO: 2116432 - DNA, 15 bp, Homo sapiens
gtgaatcacctgagg

SEQ ID NO: 2116433 - DNA, 15 bp, Homo sapiens
tgaatcacctgaggt

SEQ ID NO: 2116434 - DNA, 15 bp, Homo sapiens
catggagaaaccccg

SEQ ID NO: 2116435 - DNA, 15 bp, Homo sapiens
atggagaaaccccgt

SEQ ID NO: 2116436 - DNA, 15 bp, Homo sapiens
atacaaaattagcct

SEQ ID NO: 2116437 - DNA, 15 bp, Homo sapiens
tacaaaattagcctg

SEQ ID NO: 2116438 - DNA, 15 bp, Homo sapiens
acaaaattagcctgg

SEQ ID NO: 2116439 - DNA, 15 bp, Homo sapiens
caaaattagcctggc

SEQ ID NO: 2116440 - DNA, 15 bp, Homo sapiens
aaaattagcctggcg

SEQ ID NO: 2116441 - DNA, 15 bp, Homo sapiens
aaattagcctggcgt

SEQ ID NO: 2116442 - DNA, 15 bp, Homo sapiens
aattagcctggcgtg

SEQ ID NO: 2116443 - DNA, 15 bp, Homo sapiens
attagcctggcgtgg

SEQ ID NO: 2116444 - DNA, 15 bp, Homo sapiens
ttagcctggcgtggt

SEQ ID NO: 2116445 - DNA, 15 bp, Homo sapiens
tagcctggcgtggtc

SEQ ID NO: 2116446 - DNA, 15 bp, Homo sapiens
agcctggcgtggtcg

SEQ ID NO: 2116447 - DNA, 15 bp, Homo sapiens
gcctggcgtggtcgc

SEQ ID NO: 2116448 - DNA, 15 bp, Homo sapiens
cctggcgtggtcgcg

SEQ ID NO: 2116449 - DNA, 15 bp, Homo sapiens
ctggcgtggtcgcgc

SEQ ID NO: 2116450 - DNA, 15 bp, Homo sapiens
tggcgtggtcgcgca

SEQ ID NO: 2116451 - DNA, 15 bp, Homo sapiens
ggcgtggtcgcgcat

SEQ ID NO: 2116452 - DNA, 15 bp, Homo sapiens
gcgtggtcgcgcatg

SEQ ID NO: 2116453 - DNA, 15 bp, Homo sapiens
cgtggtcgcgcatgc

SEQ ID NO: 2116454 - DNA, 15 bp, Homo sapiens
gtggtcgcgcatgcc

SEQ ID NO: 2116455 - DNA, 15 bp, Homo sapiens
tggtcgcgcatgcct

SEQ ID NO: 2116456 - DNA, 15 bp, Homo sapiens
ggtcgcgcatgcctg

SEQ ID NO: 2116457 - DNA, 15 bp, Homo sapiens
gtcgcgcatgcctgt

SEQ ID NO: 2116458 - DNA, 15 bp, Homo sapiens
tcgcgcatgcctgta

SEQ ID NO: 2116459 - DNA, 15 bp, Homo sapiens
cgcgcatgcctgtaa

SEQ ID NO: 2116460 - DNA, 15 bp, Homo sapiens
gcatgcctgtaatct

SEQ ID NO: 2116461 - DNA, 15 bp, Homo sapiens
cctgtaatctcagct

SEQ ID NO: 2116462 - DNA, 15 bp, Homo sapiens
ctgtaatctcagcta

SEQ ID NO: 2116463 - DNA, 15 bp, Homo sapiens
tgtaatctcagctac

SEQ ID NO: 2116464 - DNA, 15 bp, Homo sapiens
gtaatctcagctact

SEQ ID NO: 2116465 - DNA, 15 bp, Homo sapiens
taatctcagctactc

SEQ ID NO: 2116466 - DNA, 15 bp, Homo sapiens
aatctcagctactcg

SEQ ID NO: 2116467 - DNA, 15 bp, Homo sapiens
atctcagctactcga

SEQ ID NO: 2116468 - DNA, 15 bp, Homo sapiens
tctcagctactcgag

SEQ ID NO: 2116469 - DNA, 15 bp, Homo sapiens
ctcagctactcgaga

SEQ ID NO: 2116470 - DNA, 15 bp, Homo sapiens
tcagctactcgagag

SEQ ID NO: 2116471 - DNA, 15 bp, Homo sapiens
cagctactcgagagg

SEQ ID NO: 2116472 - DNA, 15 bp, Homo sapiens
agctactcgagaggc

SEQ ID NO: 2116473 - DNA, 15 bp, Homo sapiens
gctactcgagaggct

SEQ ID NO: 2116474 - DNA, 15 bp, Homo sapiens
ctactcgagaggctg

SEQ ID NO: 2116475 - DNA, 15 bp, Homo sapiens
tactcgagaggctga

SEQ ID NO: 2116476 - DNA, 15 bp, Homo sapiens
actcgagaggctgag

SEQ ID NO: 2116477 - DNA, 15 bp, Homo sapiens
ctcgagaggctgagg

SEQ ID NO: 2116478 - DNA, 15 bp, Homo sapiens
tcgagaggctgaggc

SEQ ID NO: 2116479 - DNA, 15 bp, Homo sapiens
cgagaggctgaggca

SEQ ID NO: 2116480 - DNA, 15 bp, Homo sapiens
gagaggctgaggcag

SEQ ID NO: 2116481 - DNA, 15 bp, Homo sapiens
agaggctgaggcagg

SEQ ID NO: 2116482 - DNA, 15 bp, Homo sapiens
gaggcaggagaataa

SEQ ID NO: 2116483 - DNA, 15 bp, Homo sapiens
aggcaggagaataac

SEQ ID NO: 2116484 - DNA, 15 bp, Homo sapiens
ggcaggagaataact

SEQ ID NO: 2116485 - DNA, 15 bp, Homo sapiens
gcaggagaataactt

SEQ ID NO: 2116486 - DNA, 15 bp, Homo sapiens
caggagaataacttg

SEQ ID NO: 2116487 - DNA, 15 bp, Homo sapiens
aggagaataacttga

SEQ ID NO: 2116488 - DNA, 15 bp, Homo sapiens
ggagaataacttgaa

SEQ ID NO: 2116489 - DNA, 15 bp, Homo sapiens
gagaataacttgaac

SEQ ID NO: 2116490 - DNA, 15 bp, Homo sapiens
agaataacttgaacc

SEQ ID NO: 2116491 - DNA, 15 bp, Homo sapiens
gaataacttgaaccc

SEQ ID NO: 2116492 - DNA, 15 bp, Homo sapiens
aataacttgaaccca

SEQ ID NO: 2116493 - DNA, 15 bp, Homo sapiens
ataacttgaacccag

SEQ ID NO: 2116494 - DNA, 15 bp, Homo sapiens
taacttgaacccagg

SEQ ID NO: 2116495 - DNA, 15 bp, Homo sapiens
aacttgaacccagga

SEQ ID NO: 2116496 - DNA, 15 bp, Homo sapiens
cttgaacccaggaga

SEQ ID NO: 2116497 - DNA, 15 bp, Homo sapiens
ttgaacccaggagac

SEQ ID NO: 2116498 - DNA, 15 bp, Homo sapiens
tgaacccaggagaca

SEQ ID NO: 2116499 - DNA, 15 bp, Homo sapiens
gaacccaggagacag

SEQ ID NO: 2116500 - DNA, 15 bp, Homo sapiens
aacccaggagacaga

SEQ ID NO: 2116501 - DNA, 15 bp, Homo sapiens
acccaggagacagag

SEQ ID NO: 2116502 - DNA, 15 bp, Homo sapiens
cccaggagacagagg

SEQ ID NO: 2116503 - DNA, 15 bp, Homo sapiens
ccaggagacagaggt

SEQ ID NO: 2116504 - DNA, 15 bp, Homo sapiens
caggagacagaggtt

SEQ ID NO: 2116505 - DNA, 15 bp, Homo sapiens
aggagacagaggttg

SEQ ID NO: 2116506 - DNA, 15 bp, Homo sapiens
ggagacagaggttgc

SEQ ID NO: 2116507 - DNA, 15 bp, Homo sapiens
gagacagaggttgca

SEQ ID NO: 2116508 - DNA, 15 bp, Homo sapiens
agacagaggttgcag

SEQ ID NO: 2116509 - DNA, 15 bp, Homo sapiens
gacagaggttgcagt

SEQ ID NO: 2116510 - DNA, 15 bp, Homo sapiens
acagaggttgcagtg

SEQ ID NO: 2116511 - DNA, 15 bp, Homo sapiens
tgagattgcgccatt

SEQ ID NO: 2116512 - DNA, 15 bp, Homo sapiens
gagattgcgccattg

SEQ ID NO: 2116513 - DNA, 15 bp, Homo sapiens
agattgcgccattgc

SEQ ID NO: 2116514 - DNA, 15 bp, Homo sapiens
gattgcgccattgca

SEQ ID NO: 2116515 - DNA, 15 bp, Homo sapiens
attgcgccattgcac

SEQ ID NO: 2116516 - DNA, 15 bp, Homo sapiens
ttgcgccattgcact

SEQ ID NO: 2116517 - DNA, 15 bp, Homo sapiens
tgcgccattgcactc

SEQ ID NO: 2116518 - DNA, 15 bp, Homo sapiens
gcgccattgcactcc

SEQ ID NO: 2116519 - DNA, 15 bp, Homo sapiens
cgccattgcactcca

SEQ ID NO: 2116520 - DNA, 15 bp, Homo sapiens
gccattgcactccag

SEQ ID NO: 2116521 - DNA, 15 bp, Homo sapiens
acaagagcgaaactg

SEQ ID NO: 2116522 - DNA, 15 bp, Homo sapiens
caagagcgaaactgc

SEQ ID NO: 2116523 - DNA, 15 bp, Homo sapiens
aagagcgaaactgcg

SEQ ID NO: 2116524 - DNA, 15 bp, Homo sapiens
agagcgaaactgcga

SEQ ID NO: 2116525 - DNA, 15 bp, Homo sapiens
gagcgaaactgcgaa

SEQ ID NO: 2116526 - DNA, 15 bp, Homo sapiens
agcgaaactgcgaaa

SEQ ID NO: 2116527 - DNA, 15 bp, Homo sapiens
gcgaaactgcgaaaa

SEQ ID NO: 2116528 - DNA, 15 bp, Homo sapiens
cgaaactgcgaaaaa

SEQ ID NO: 2116529 - DNA, 15 bp, Homo sapiens
gaaactgcgaaaaaa

SEQ ID NO: 2116530 - DNA, 15 bp, Homo sapiens
aaactgcgaaaaaaa

SEQ ID NO: 2116531 - DNA, 15 bp, Homo sapiens
aactgcgaaaaaaaa

SEQ ID NO: 2116532 - DNA, 15 bp, Homo sapiens
actgcgaaaaaaaaa

SEQ ID NO: 2116533 - DNA, 15 bp, Homo sapiens
ctgcgaaaaaaaaaa

SEQ ID NO: 2116534 - DNA, 15 bp, Homo sapiens
tgcgaaaaaaaaaaa

SEQ ID NO: 2116535 - DNA, 15 bp, Homo sapiens
gcgaaaaaaaaaaaa

SEQ ID NO: 2116536 - DNA, 15 bp, Homo sapiens
cgaaaaaaaaaaaat

SEQ ID NO: 2116537 - DNA, 15 bp, Homo sapiens
gaaaaaaaaaaaata

SEQ ID NO: 2116538 - DNA, 15 bp, Homo sapiens
aaaaaaaaatacacg

SEQ ID NO: 2116539 - DNA, 15 bp, Homo sapiens
aaaaaaaatacacgc

SEQ ID NO: 2116540 - DNA, 15 bp, Homo sapiens
aaaaaaatacacgcc

SEQ ID NO: 2116541 - DNA, 15 bp, Homo sapiens
aaaaaatacacgcca

SEQ ID NO: 2116542 - DNA, 15 bp, Homo sapiens
aaaaatacacgccac

SEQ ID NO: 2116543 - DNA, 15 bp, Homo sapiens
aaaatacacgccaca

SEQ ID NO: 2116544 - DNA, 15 bp, Homo sapiens
aaatacacgccacaa

SEQ ID NO: 2116545 - DNA, 15 bp, Homo sapiens
aatacacgccacaaa

SEQ ID NO: 2116546 - DNA, 15 bp, Homo sapiens
atacacgccacaaaa

SEQ ID NO: 2116547 - DNA, 15 bp, Homo sapiens
tacacgccacaaaaa

SEQ ID NO: 2116548 - DNA, 15 bp, Homo sapiens
acacgccacaaaaac

SEQ ID NO: 2116549 - DNA, 15 bp, Homo sapiens
cacgccacaaaaaca

SEQ ID NO: 2116550 - DNA, 15 bp, Homo sapiens
acgccacaaaaacag

SEQ ID NO: 2116551 - DNA, 15 bp, Homo sapiens
cgccacaaaaacagt

SEQ ID NO: 2116552 - DNA, 15 bp, Homo sapiens
gccacaaaaacagtt

SEQ ID NO: 2116553 - DNA, 15 bp, Homo sapiens
ccacaaaaacagtta

SEQ ID NO: 2116554 - DNA, 15 bp, Homo sapiens
cacaaaaacagttaa

SEQ ID NO: 2116555 - DNA, 15 bp, Homo sapiens
acaaaaacagttaag

SEQ ID NO: 2116556 - DNA, 15 bp, Homo sapiens
caaaaacagttaagc

SEQ ID NO: 2116557 - DNA, 15 bp, Homo sapiens
aaaaacagttaagca

SEQ ID NO: 2116558 - DNA, 15 bp, Homo sapiens
aaaacagttaagcaa

SEQ ID NO: 2116559 - DNA, 15 bp, Homo sapiens
aaacagttaagcaaa

SEQ ID NO: 2116560 - DNA, 15 bp, Homo sapiens
aacagttaagcaaat

SEQ ID NO: 2116561 - DNA, 15 bp, Homo sapiens
acagttaagcaaatc

SEQ ID NO: 2116562 - DNA, 15 bp, Homo sapiens
cagttaagcaaatct

SEQ ID NO: 2116563 - DNA, 15 bp, Homo sapiens
agttaagcaaatcta

SEQ ID NO: 2116564 - DNA, 15 bp, Homo sapiens
gttaagcaaatctat

SEQ ID NO: 2116565 - DNA, 15 bp, Homo sapiens
ttaagcaaatctatg

SEQ ID NO: 2116566 - DNA, 15 bp, Homo sapiens
taagcaaatctatgc

SEQ ID NO: 2116567 - DNA, 15 bp, Homo sapiens
aagcaaatctatgca

SEQ ID NO: 2116568 - DNA, 15 bp, Homo sapiens
agcaaatctatgcag

SEQ ID NO: 2116569 - DNA, 15 bp, Homo sapiens
gcaaatctatgcaga

SEQ ID NO: 2116570 - DNA, 15 bp, Homo sapiens
caaatctatgcagaa

SEQ ID NO: 2116571 - DNA, 15 bp, Homo sapiens
aaatctatgcagaag

SEQ ID NO: 2116572 - DNA, 15 bp, Homo sapiens
aatctatgcagaagg

SEQ ID NO: 2116573 - DNA, 15 bp, Homo sapiens
atctatgcagaagga

SEQ ID NO: 2116574 - DNA, 15 bp, Homo sapiens
tctatgcagaaggaa

SEQ ID NO: 2116575 - DNA, 15 bp, Homo sapiens
ctatgcagaaggaaa

SEQ ID NO: 2116576 - DNA, 15 bp, Homo sapiens
tatgcagaaggaaaa

SEQ ID NO: 2116577 - DNA, 15 bp, Homo sapiens
atgcagaaggaaaaa

SEQ ID NO: 2116578 - DNA, 15 bp, Homo sapiens
tgcagaaggaaaaac

SEQ ID NO: 2116579 - DNA, 15 bp, Homo sapiens
gcagaaggaaaaaca

SEQ ID NO: 2116580 - DNA, 15 bp, Homo sapiens
cagaaggaaaaacaa

SEQ ID NO: 2116581 - DNA, 15 bp, Homo sapiens
agaaggaaaaacaag

SEQ ID NO: 2116582 - DNA, 15 bp, Homo sapiens
gaaggaaaaacaagg

SEQ ID NO: 2116583 - DNA, 15 bp, Homo sapiens
aaggaaaaacaaggt

SEQ ID NO: 2116584 - DNA, 15 bp, Homo sapiens
aggaaaaacaaggta

SEQ ID NO: 2116585 - DNA, 15 bp, Homo sapiens
ggaaaaacaaggtac

SEQ ID NO: 2116586 - DNA, 15 bp, Homo sapiens
gaaaaacaaggtaca

SEQ ID NO: 2116587 - DNA, 15 bp, Homo sapiens
aaaaacaaggtacag

SEQ ID NO: 2116588 - DNA, 15 bp, Homo sapiens
aaaacaaggtacaga

SEQ ID NO: 2116589 - DNA, 15 bp, Homo sapiens
aaacaaggtacagaa

SEQ ID NO: 2116590 - DNA, 15 bp, Homo sapiens
aacaaggtacagaaa

SEQ ID NO: 2116591 - DNA, 15 bp, Homo sapiens
acaaggtacagaaaa

SEQ ID NO: 2116592 - DNA, 15 bp, Homo sapiens
caaggtacagaaaac

SEQ ID NO: 2116593 - DNA, 15 bp, Homo sapiens
aaggtacagaaaacc

SEQ ID NO: 2116594 - DNA, 15 bp, Homo sapiens
aggtacagaaaacca

SEQ ID NO: 2116595 - DNA, 15 bp, Homo sapiens
ggtacagaaaaccag

SEQ ID NO: 2116596 - DNA, 15 bp, Homo sapiens
gtacagaaaaccagg

SEQ ID NO: 2116597 - DNA, 15 bp, Homo sapiens
tacagaaaaccaggg

SEQ ID NO: 2116598 - DNA, 15 bp, Homo sapiens
acagaaaaccaggga

SEQ ID NO: 2116599 - DNA, 15 bp, Homo sapiens
cagaaaaccagggat

SEQ ID NO: 2116600 - DNA, 15 bp, Homo sapiens
agaaaaccagggatt

SEQ ID NO: 2116601 - DNA, 15 bp, Homo sapiens
gaaaaccagggattc

SEQ ID NO: 2116602 - DNA, 15 bp, Homo sapiens
aaaaccagggattca

SEQ ID NO: 2116603 - DNA, 15 bp, Homo sapiens
aaaccagggattcag

SEQ ID NO: 2116604 - DNA, 15 bp, Homo sapiens
aaccagggattcagt

SEQ ID NO: 2116605 - DNA, 15 bp, Homo sapiens
accagggattcagta

SEQ ID NO: 2116606 - DNA, 15 bp, Homo sapiens
ccagggattcagtaa

SEQ ID NO: 2116607 - DNA, 15 bp, Homo sapiens
cagggattcagtaaa

SEQ ID NO: 2116608 - DNA, 15 bp, Homo sapiens
agggattcagtaaat

SEQ ID NO: 2116609 - DNA, 15 bp, Homo sapiens
gggattcagtaaatt

SEQ ID NO: 2116610 - DNA, 15 bp, Homo sapiens
ggattcagtaaattc

SEQ ID NO: 2116611 - DNA, 15 bp, Homo sapiens
gattcagtaaattcc

SEQ ID NO: 2116612 - DNA, 15 bp, Homo sapiens
attcagtaaattcct

SEQ ID NO: 2116613 - DNA, 15 bp, Homo sapiens
ttcagtaaattcctt

SEQ ID NO: 2116614 - DNA, 15 bp, Homo sapiens
tcagtaaattcctta

SEQ ID NO: 2116615 - DNA, 15 bp, Homo sapiens
cagtaaattccttat

SEQ ID NO: 2116616 - DNA, 15 bp, Homo sapiens
agtaaattccttata

SEQ ID NO: 2116617 - DNA, 15 bp, Homo sapiens
gtaaattccttatac

SEQ ID NO: 2116618 - DNA, 15 bp, Homo sapiens
taaattccttataca

SEQ ID NO: 2116619 - DNA, 15 bp, Homo sapiens
aaattccttatacag

SEQ ID NO: 2116620 - DNA, 15 bp, Homo sapiens
aattccttatacagg

SEQ ID NO: 2116621 - DNA, 15 bp, Homo sapiens
attccttatacaggc

SEQ ID NO: 2116622 - DNA, 15 bp, Homo sapiens
ttccttatacaggcc

SEQ ID NO: 2116623 - DNA, 15 bp, Homo sapiens
tccttatacaggccc

SEQ ID NO: 2116624 - DNA, 15 bp, Homo sapiens
ccttatacaggcccc

SEQ ID NO: 2116625 - DNA, 15 bp, Homo sapiens
cttatacaggccccc

SEQ ID NO: 2116626 - DNA, 15 bp, Homo sapiens
ttatacaggcccccg

SEQ ID NO: 2116627 - DNA, 15 bp, Homo sapiens
tatacaggcccccgg

SEQ ID NO: 2116628 - DNA, 15 bp, Homo sapiens
atacaggcccccggg

SEQ ID NO: 2116629 - DNA, 15 bp, Homo sapiens
tacaggcccccgggg

SEQ ID NO: 2116630 - DNA, 15 bp, Homo sapiens
acaggcccccggggc

SEQ ID NO: 2116631 - DNA, 15 bp, Homo sapiens
caggcccccggggct

SEQ ID NO: 2116632 - DNA, 15 bp, Homo sapiens
aggcccccggggctc

SEQ ID NO: 2116633 - DNA, 15 bp, Homo sapiens
ggcccccggggctct

SEQ ID NO: 2116634 - DNA, 15 bp, Homo sapiens
gcccccggggctctc

SEQ ID NO: 2116635 - DNA, 15 bp, Homo sapiens
cccccggggctctcc

SEQ ID NO: 2116636 - DNA, 15 bp, Homo sapiens
ccccggggctctcct

SEQ ID NO: 2116637 - DNA, 15 bp, Homo sapiens
cccggggctctccta

SEQ ID NO: 2116638 - DNA, 15 bp, Homo sapiens
ccggggctctcctat

SEQ ID NO: 2116639 - DNA, 15 bp, Homo sapiens
cggggctctcctatt

SEQ ID NO: 2116640 - DNA, 15 bp, Homo sapiens
ggggctctcctattc

SEQ ID NO: 2116641 - DNA, 15 bp, Homo sapiens
gggctctcctattcc

SEQ ID NO: 2116642 - DNA, 15 bp, Homo sapiens
ggctctcctattcca

SEQ ID NO: 2116643 - DNA, 15 bp, Homo sapiens
gctctcctattccac

SEQ ID NO: 2116644 - DNA, 15 bp, Homo sapiens
ctctcctattccact

SEQ ID NO: 2116645 - DNA, 15 bp, Homo sapiens
tctcctattccactt

SEQ ID NO: 2116646 - DNA, 15 bp, Homo sapiens
ctcctattccacttt

SEQ ID NO: 2116647 - DNA, 15 bp, Homo sapiens
tcctattccactttt

SEQ ID NO: 2116648 - DNA, 15 bp, Homo sapiens
cctattccacttttt

SEQ ID NO: 2116649 - DNA, 15 bp, Homo sapiens
ctattccacttttta

SEQ ID NO: 2116650 - DNA, 15 bp, Homo sapiens
tattccactttttaa

SEQ ID NO: 2116651 - DNA, 15 bp, Homo sapiens
attccactttttaac

SEQ ID NO: 2116652 - DNA, 15 bp, Homo sapiens
ttccactttttaaca

SEQ ID NO: 2116653 - DNA, 15 bp, Homo sapiens
tccactttttaacaa

SEQ ID NO: 2116654 - DNA, 15 bp, Homo sapiens
ccactttttaacaat

SEQ ID NO: 2116655 - DNA, 15 bp, Homo sapiens
cactttttaacaatt

SEQ ID NO: 2116656 - DNA, 15 bp, Homo sapiens
actttttaacaattt

SEQ ID NO: 2116657 - DNA, 15 bp, Homo sapiens
ctttttaacaatttc

SEQ ID NO: 2116658 - DNA, 15 bp, Homo sapiens
tttttaacaatttca

SEQ ID NO: 2116659 - DNA, 15 bp, Homo sapiens
ttttaacaatttcaa

SEQ ID NO: 2116660 - DNA, 15 bp, Homo sapiens
tttaacaatttcaat

SEQ ID NO: 2116661 - DNA, 15 bp, Homo sapiens
ttaacaatttcaatt

SEQ ID NO: 2116662 - DNA, 15 bp, Homo sapiens
taacaatttcaattg

SEQ ID NO: 2116663 - DNA, 15 bp, Homo sapiens
aacaatttcaattgt

SEQ ID NO: 2116664 - DNA, 15 bp, Homo sapiens
acaatttcaattgtt

SEQ ID NO: 2116665 - DNA, 15 bp, Homo sapiens
caatttcaattgttt

SEQ ID NO: 2116666 - DNA, 15 bp, Homo sapiens
aatttcaattgtttt

SEQ ID NO: 2116667 - DNA, 15 bp, Homo sapiens
atttcaattgttttt

SEQ ID NO: 2116668 - DNA, 15 bp, Homo sapiens
tttcaattgtttttc

SEQ ID NO: 2116669 - DNA, 15 bp, Homo sapiens
ttcaattgtttttca

SEQ ID NO: 2116670 - DNA, 15 bp, Homo sapiens
tcaattgtttttcaa

SEQ ID NO: 2116671 - DNA, 15 bp, Homo sapiens
caattgtttttcaag

SEQ ID NO: 2116672 - DNA, 15 bp, Homo sapiens
aattgtttttcaagc

SEQ ID NO: 2116673 - DNA, 15 bp, Homo sapiens
attgtttttcaagct

SEQ ID NO: 2116674 - DNA, 15 bp, Homo sapiens
ttgtttttcaagcta

SEQ ID NO: 2116675 - DNA, 15 bp, Homo sapiens
tgtttttcaagctaa

SEQ ID NO: 2116676 - DNA, 15 bp, Homo sapiens
gtttttcaagctaag

SEQ ID NO: 2116677 - DNA, 15 bp, Homo sapiens
tttttcaagctaaga

SEQ ID NO: 2116678 - DNA, 15 bp, Homo sapiens
ttttcaagctaagaa

SEQ ID NO: 2116679 - DNA, 15 bp, Homo sapiens
tttcaagctaagaaa

SEQ ID NO: 2116680 - DNA, 15 bp, Homo sapiens
ttcaagctaagaaat

SEQ ID NO: 2116681 - DNA, 15 bp, Homo sapiens
tcaagctaagaaatt

SEQ ID NO: 2116682 - DNA, 15 bp, Homo sapiens
caagctaagaaattt

SEQ ID NO: 2116683 - DNA, 15 bp, Homo sapiens
aagctaagaaatttt

SEQ ID NO: 2116684 - DNA, 15 bp, Homo sapiens
agctaagaaattttg

SEQ ID NO: 2116685 - DNA, 15 bp, Homo sapiens
gctaagaaattttga

SEQ ID NO: 2116686 - DNA, 15 bp, Homo sapiens
ctaagaaattttgat

SEQ ID NO: 2116687 - DNA, 15 bp, Homo sapiens
taagaaattttgatt

SEQ ID NO: 2116688 - DNA, 15 bp, Homo sapiens
aagaaattttgattt

SEQ ID NO: 2116689 - DNA, 15 bp, Homo sapiens
agaaattttgatttc

SEQ ID NO: 2116690 - DNA, 15 bp, Homo sapiens
gaaattttgatttct

SEQ ID NO: 2116691 - DNA, 15 bp, Homo sapiens
aaattttgatttctt

SEQ ID NO: 2116692 - DNA, 15 bp, Homo sapiens
aattttgatttctta

SEQ ID NO: 2116693 - DNA, 15 bp, Homo sapiens
attttgatttcttaa

SEQ ID NO: 2116694 - DNA, 15 bp, Homo sapiens
ttttgatttcttaaa

SEQ ID NO: 2116695 - DNA, 15 bp, Homo sapiens
tttgatttcttaaaa

SEQ ID NO: 2116696 - DNA, 15 bp, Homo sapiens
ttgatttcttaaaac

SEQ ID NO: 2116697 - DNA, 15 bp, Homo sapiens
tgatttcttaaaaca

SEQ ID NO: 2116698 - DNA, 15 bp, Homo sapiens
gatttcttaaaacaa

SEQ ID NO: 2116699 - DNA, 15 bp, Homo sapiens
atttcttaaaacaag

SEQ ID NO: 2116700 - DNA, 15 bp, Homo sapiens
tttcttaaaacaagg

SEQ ID NO: 2116701 - DNA, 15 bp, Homo sapiens
ttcttaaaacaagga

SEQ ID NO: 2116702 - DNA, 15 bp, Homo sapiens
tcttaaaacaaggaa

SEQ ID NO: 2116703 - DNA, 15 bp, Homo sapiens
cttaaaacaaggaaa

SEQ ID NO: 2116704 - DNA, 15 bp, Homo sapiens
ttaaaacaaggaaat

SEQ ID NO: 2116705 - DNA, 15 bp, Homo sapiens
taaaacaaggaaatg

SEQ ID NO: 2116706 - DNA, 15 bp, Homo sapiens
aaaacaaggaaatgg

SEQ ID NO: 2116707 - DNA, 15 bp, Homo sapiens
aaacaaggaaatggc

SEQ ID NO: 2116708 - DNA, 15 bp, Homo sapiens
aacaaggaaatggca

SEQ ID NO: 2116709 - DNA, 15 bp, Homo sapiens
acaaggaaatggcag

SEQ ID NO: 2116710 - DNA, 15 bp, Homo sapiens
caaggaaatggcagt

SEQ ID NO: 2116711 - DNA, 15 bp, Homo sapiens
aaggaaatggcagtg

SEQ ID NO: 2116712 - DNA, 15 bp, Homo sapiens
aggaaatggcagtga

SEQ ID NO: 2116713 - DNA, 15 bp, Homo sapiens
ggaaatggcagtgat

SEQ ID NO: 2116714 - DNA, 15 bp, Homo sapiens
gaaatggcagtgata

SEQ ID NO: 2116715 - DNA, 15 bp, Homo sapiens
aaatggcagtgataa

SEQ ID NO: 2116716 - DNA, 15 bp, Homo sapiens
aatggcagtgataat

SEQ ID NO: 2116717 - DNA, 15 bp, Homo sapiens
atggcagtgataatg

SEQ ID NO: 2116718 - DNA, 15 bp, Homo sapiens
tggcagtgataatgg

SEQ ID NO: 2116719 - DNA, 15 bp, Homo sapiens
ggcagtgataatgga

SEQ ID NO: 2116720 - DNA, 15 bp, Homo sapiens
gcagtgataatggaa

SEQ ID NO: 2116721 - DNA, 15 bp, Homo sapiens
cagtgataatggaat

SEQ ID NO: 2116722 - DNA, 15 bp, Homo sapiens
agtgataatggaatt

SEQ ID NO: 2116723 - DNA, 15 bp, Homo sapiens
gtgataatggaatta

SEQ ID NO: 2116724 - DNA, 15 bp, Homo sapiens
tgataatggaattag

SEQ ID NO: 2116725 - DNA, 15 bp, Homo sapiens
gataatggaattagg

SEQ ID NO: 2116726 - DNA, 15 bp, Homo sapiens
ataatggaattaggc

SEQ ID NO: 2116727 - DNA, 15 bp, Homo sapiens
taatggaattaggcc

SEQ ID NO: 2116728 - DNA, 15 bp, Homo sapiens
aatggaattaggcct

SEQ ID NO: 2116729 - DNA, 15 bp, Homo sapiens
atggaattaggccta

SEQ ID NO: 2116730 - DNA, 15 bp, Homo sapiens
tggaattaggcctac

SEQ ID NO: 2116731 - DNA, 15 bp, Homo sapiens
ggaattaggcctacc

SEQ ID NO: 2116732 - DNA, 15 bp, Homo sapiens
gaattaggcctacca

SEQ ID NO: 2116733 - DNA, 15 bp, Homo sapiens
aattaggcctaccaa

SEQ ID NO: 2116734 - DNA, 15 bp, Homo sapiens
attaggcctaccaaa

SEQ ID NO: 2116735 - DNA, 15 bp, Homo sapiens
ttaggcctaccaaaa

SEQ ID NO: 2116736 - DNA, 15 bp, Homo sapiens
taggcctaccaaaac

SEQ ID NO: 2116737 - DNA, 15 bp, Homo sapiens
aggcctaccaaaact

SEQ ID NO: 2116738 - DNA, 15 bp, Homo sapiens
ggcctaccaaaactg

SEQ ID NO: 2116739 - DNA, 15 bp, Homo sapiens
gcctaccaaaactga

SEQ ID NO: 2116740 - DNA, 15 bp, Homo sapiens
cctaccaaaactgag

SEQ ID NO: 2116741 - DNA, 15 bp, Homo sapiens
ctaccaaaactgagc

SEQ ID NO: 2116742 - DNA, 15 bp, Homo sapiens
taccaaaactgagct

SEQ ID NO: 2116743 - DNA, 15 bp, Homo sapiens
accaaaactgagcta

SEQ ID NO: 2116744 - DNA, 15 bp, Homo sapiens
ccaaaactgagctaa

SEQ ID NO: 2116745 - DNA, 15 bp, Homo sapiens
caaaactgagctaat

SEQ ID NO: 2116746 - DNA, 15 bp, Homo sapiens
aaaactgagctaata

SEQ ID NO: 2116747 - DNA, 15 bp, Homo sapiens
aaactgagctaatac

SEQ ID NO: 2116748 - DNA, 15 bp, Homo sapiens
aactgagctaataca

SEQ ID NO: 2116749 - DNA, 15 bp, Homo sapiens
actgagctaatacag

SEQ ID NO: 2116750 - DNA, 15 bp, Homo sapiens
ctgagctaatacaga

SEQ ID NO: 2116751 - DNA, 15 bp, Homo sapiens
tgagctaatacagat

SEQ ID NO: 2116752 - DNA, 15 bp, Homo sapiens
gagctaatacagatg

SEQ ID NO: 2116753 - DNA, 15 bp, Homo sapiens
agctaatacagatga

SEQ ID NO: 2116754 - DNA, 15 bp, Homo sapiens
gctaatacagatgaa

SEQ ID NO: 2116755 - DNA, 15 bp, Homo sapiens
ctaatacagatgaag

SEQ ID NO: 2116756 - DNA, 15 bp, Homo sapiens
taatacagatgaagt

SEQ ID NO: 2116757 - DNA, 15 bp, Homo sapiens
aatacagatgaagtt

SEQ ID NO: 2116758 - DNA, 15 bp, Homo sapiens
atacagatgaagtta

SEQ ID NO: 2116759 - DNA, 15 bp, Homo sapiens
tacagatgaagttag

SEQ ID NO: 2116760 - DNA, 15 bp, Homo sapiens
acagatgaagttagt

SEQ ID NO: 2116761 - DNA, 15 bp, Homo sapiens
cagatgaagttagtc

SEQ ID NO: 2116762 - DNA, 15 bp, Homo sapiens
agatgaagttagtct

SEQ ID NO: 2116763 - DNA, 15 bp, Homo sapiens
gatgaagttagtctt

SEQ ID NO: 2116764 - DNA, 15 bp, Homo sapiens
atgaagttagtctta

SEQ ID NO: 2116765 - DNA, 15 bp, Homo sapiens
tgaagttagtcttat

SEQ ID NO: 2116766 - DNA, 15 bp, Homo sapiens
gaagttagtcttatt

SEQ ID NO: 2116767 - DNA, 15 bp, Homo sapiens
agttagtcttatttg

SEQ ID NO: 2116768 - DNA, 15 bp, Homo sapiens
gttagtcttatttgt

SEQ ID NO: 2116769 - DNA, 15 bp, Homo sapiens
ttagtcttatttgta

SEQ ID NO: 2116770 - DNA, 15 bp, Homo sapiens
tagtcttatttgtaa

SEQ ID NO: 2116771 - DNA, 15 bp, Homo sapiens
agtcttatttgtaaa

SEQ ID NO: 2116772 - DNA, 15 bp, Homo sapiens
gtcttatttgtaaac

SEQ ID NO: 2116773 - DNA, 15 bp, Homo sapiens
tcttatttgtaaaca

SEQ ID NO: 2116774 - DNA, 15 bp, Homo sapiens
cttatttgtaaacaa

SEQ ID NO: 2116775 - DNA, 15 bp, Homo sapiens
ttatttgtaaacaaa

SEQ ID NO: 2116776 - DNA, 15 bp, Homo sapiens
tatttgtaaacaaat

SEQ ID NO: 2116777 - DNA, 15 bp, Homo sapiens
atttgtaaacaaatc

SEQ ID NO: 2116778 - DNA, 15 bp, Homo sapiens
tttgtaaacaaatcc

SEQ ID NO: 2116779 - DNA, 15 bp, Homo sapiens
ttgtaaacaaatcct

SEQ ID NO: 2116780 - DNA, 15 bp, Homo sapiens
tgtaaacaaatcctg

SEQ ID NO: 2116781 - DNA, 15 bp, Homo sapiens
gtaaacaaatcctga

SEQ ID NO: 2116782 - DNA, 15 bp, Homo sapiens
taaacaaatcctgag

SEQ ID NO: 2116783 - DNA, 15 bp, Homo sapiens
aaacaaatcctgaga

SEQ ID NO: 2116784 - DNA, 15 bp, Homo sapiens
aacaaatcctgagaa

SEQ ID NO: 2116785 - DNA, 15 bp, Homo sapiens
acaaatcctgagaac

SEQ ID NO: 2116786 - DNA, 15 bp, Homo sapiens
caaatcctgagaact

SEQ ID NO: 2116787 - DNA, 15 bp, Homo sapiens
aaatcctgagaactt

SEQ ID NO: 2116788 - DNA, 15 bp, Homo sapiens
aatcctgagaactta

SEQ ID NO: 2116789 - DNA, 15 bp, Homo sapiens
atcctgagaacttaa

SEQ ID NO: 2116790 - DNA, 15 bp, Homo sapiens
tcctgagaacttaat

SEQ ID NO: 2116791 - DNA, 15 bp, Homo sapiens
cctgagaacttaata

SEQ ID NO: 2116792 - DNA, 15 bp, Homo sapiens
ctgagaacttaatac

SEQ ID NO: 2116793 - DNA, 15 bp, Homo sapiens
tgagaacttaatacc

SEQ ID NO: 2116794 - DNA, 15 bp, Homo sapiens
gagaacttaataccc

SEQ ID NO: 2116795 - DNA, 15 bp, Homo sapiens
agaacttaataccca

SEQ ID NO: 2116796 - DNA, 15 bp, Homo sapiens
gaacttaatacccat

SEQ ID NO: 2116797 - DNA, 15 bp, Homo sapiens
aacttaatacccatc

SEQ ID NO: 2116798 - DNA, 15 bp, Homo sapiens
acttaatacccatct

SEQ ID NO: 2116799 - DNA, 15 bp, Homo sapiens
cttaatacccatctg

SEQ ID NO: 2116800 - DNA, 15 bp, Homo sapiens
ttaatacccatctgc

SEQ ID NO: 2116801 - DNA, 15 bp, Homo sapiens
taatacccatctgcc

SEQ ID NO: 2116802 - DNA, 15 bp, Homo sapiens
aatacccatctgcca

SEQ ID NO: 2116803 - DNA, 15 bp, Homo sapiens
atacccatctgccaa

SEQ ID NO: 2116804 - DNA, 15 bp, Homo sapiens
tacccatctgccaaa

SEQ ID NO: 2116805 - DNA, 15 bp, Homo sapiens
acccatctgccaaag

SEQ ID NO: 2116806 - DNA, 15 bp, Homo sapiens
cccatctgccaaagg

SEQ ID NO: 2116807 - DNA, 15 bp, Homo sapiens
ccatctgccaaagga

SEQ ID NO: 2116808 - DNA, 15 bp, Homo sapiens
catctgccaaaggaa

SEQ ID NO: 2116809 - DNA, 15 bp, Homo sapiens
atctgccaaaggaaa

SEQ ID NO: 2116810 - DNA, 15 bp, Homo sapiens
tctgccaaaggaaag

SEQ ID NO: 2116811 - DNA, 15 bp, Homo sapiens
ctgccaaaggaaagt

SEQ ID NO: 2116812 - DNA, 15 bp, Homo sapiens
tgccaaaggaaagtg

SEQ ID NO: 2116813 - DNA, 15 bp, Homo sapiens
gccaaaggaaagtgg

SEQ ID NO: 2116814 - DNA, 15 bp, Homo sapiens
ccaaaggaaagtggg

SEQ ID NO: 2116815 - DNA, 15 bp, Homo sapiens
caaaggaaagtggga

SEQ ID NO: 2116816 - DNA, 15 bp, Homo sapiens
aaaggaaagtgggaa

SEQ ID NO: 2116817 - DNA, 15 bp, Homo sapiens
aaggaaagtgggaat

SEQ ID NO: 2116818 - DNA, 15 bp, Homo sapiens
aggaaagtgggaata

SEQ ID NO: 2116819 - DNA, 15 bp, Homo sapiens
ggaaagtgggaataa

SEQ ID NO: 2116820 - DNA, 15 bp, Homo sapiens
gaaagtgggaataat

SEQ ID NO: 2116821 - DNA, 15 bp, Homo sapiens
aaagtgggaataatt

SEQ ID NO: 2116822 - DNA, 15 bp, Homo sapiens
aagtgggaataattt

SEQ ID NO: 2116823 - DNA, 15 bp, Homo sapiens
agtgggaataattta

SEQ ID NO: 2116824 - DNA, 15 bp, Homo sapiens
gtgggaataatttaa

SEQ ID NO: 2116825 - DNA, 15 bp, Homo sapiens
tgggaataatttaaa

SEQ ID NO: 2116826 - DNA, 15 bp, Homo sapiens
gggaataatttaaaa

SEQ ID NO: 2116827 - DNA, 15 bp, Homo sapiens
ggaataatttaaaag

SEQ ID NO: 2116828 - DNA, 15 bp, Homo sapiens
gaataatttaaaagg

SEQ ID NO: 2116829 - DNA, 15 bp, Homo sapiens
aataatttaaaaggc

SEQ ID NO: 2116830 - DNA, 15 bp, Homo sapiens
ataatttaaaaggcc

SEQ ID NO: 2116831 - DNA, 15 bp, Homo sapiens
taatttaaaaggcca

SEQ ID NO: 2116832 - DNA, 15 bp, Homo sapiens
aatttaaaaggccac

SEQ ID NO: 2116833 - DNA, 15 bp, Homo sapiens
atttaaaaggccact

SEQ ID NO: 2116834 - DNA, 15 bp, Homo sapiens
tttaaaaggccacta

SEQ ID NO: 2116835 - DNA, 15 bp, Homo sapiens
ttaaaaggccactaa

SEQ ID NO: 2116836 - DNA, 15 bp, Homo sapiens
taaaaggccactaat

SEQ ID NO: 2116837 - DNA, 15 bp, Homo sapiens
aaaaggccactaatc

SEQ ID NO: 2116838 - DNA, 15 bp, Homo sapiens
aaaggccactaatca

SEQ ID NO: 2116839 - DNA, 15 bp, Homo sapiens
aaggccactaatcaa

SEQ ID NO: 2116840 - DNA, 15 bp, Homo sapiens
aggccactaatcaaa

SEQ ID NO: 2116841 - DNA, 15 bp, Homo sapiens
ggccactaatcaaaa

SEQ ID NO: 2116842 - DNA, 15 bp, Homo sapiens
gccactaatcaaaag

SEQ ID NO: 2116843 - DNA, 15 bp, Homo sapiens
ccactaatcaaaagg

SEQ ID NO: 2116844 - DNA, 15 bp, Homo sapiens
cactaatcaaaaggt

SEQ ID NO: 2116845 - DNA, 15 bp, Homo sapiens
actaatcaaaaggtg

SEQ ID NO: 2116846 - DNA, 15 bp, Homo sapiens
ctaatcaaaaggtgt

SEQ ID NO: 2116847 - DNA, 15 bp, Homo sapiens
taatcaaaaggtgtt

SEQ ID NO: 2116848 - DNA, 15 bp, Homo sapiens
aatcaaaaggtgtta

SEQ ID NO: 2116849 - DNA, 15 bp, Homo sapiens
atcaaaaggtgttaa

SEQ ID NO: 2116850 - DNA, 15 bp, Homo sapiens
tcaaaaggtgttaag

SEQ ID NO: 2116851 - DNA, 15 bp, Homo sapiens
caaaaggtgttaagt

SEQ ID NO: 2116852 - DNA, 15 bp, Homo sapiens
aaaaggtgttaagtt

SEQ ID NO: 2116853 - DNA, 15 bp, Homo sapiens
aaaggtgttaagttc

SEQ ID NO: 2116854 - DNA, 15 bp, Homo sapiens
aaggtgttaagttca

SEQ ID NO: 2116855 - DNA, 15 bp, Homo sapiens
aggtgttaagttcat

SEQ ID NO: 2116856 - DNA, 15 bp, Homo sapiens
ggtgttaagttcatt

SEQ ID NO: 2116857 - DNA, 15 bp, Homo sapiens
gtgttaagttcatta

SEQ ID NO: 2116858 - DNA, 15 bp, Homo sapiens
tgttaagttcattaa

SEQ ID NO: 2116859 - DNA, 15 bp, Homo sapiens
gttaagttcattaaa

SEQ ID NO: 2116860 - DNA, 15 bp, Homo sapiens
ttaagttcattaaat

SEQ ID NO: 2116861 - DNA, 15 bp, Homo sapiens
taagttcattaaatc

SEQ ID NO: 2116862 - DNA, 15 bp, Homo sapiens
aagttcattaaatct

SEQ ID NO: 2116863 - DNA, 15 bp, Homo sapiens
agttcattaaatcta

SEQ ID NO: 2116864 - DNA, 15 bp, Homo sapiens
gttcattaaatctat

SEQ ID NO: 2116865 - DNA, 15 bp, Homo sapiens
ttcattaaatctatc

SEQ ID NO: 2116866 - DNA, 15 bp, Homo sapiens
tcattaaatctatct

SEQ ID NO: 2116867 - DNA, 15 bp, Homo sapiens
cattaaatctatctt

SEQ ID NO: 2116868 - DNA, 15 bp, Homo sapiens
attaaatctatcttg

SEQ ID NO: 2116869 - DNA, 15 bp, Homo sapiens
ttaaatctatcttgc

SEQ ID NO: 2116870 - DNA, 15 bp, Homo sapiens
taaatctatcttgct

SEQ ID NO: 2116871 - DNA, 15 bp, Homo sapiens
aaatctatcttgctg

SEQ ID NO: 2116872 - DNA, 15 bp, Homo sapiens
aatctatcttgctgt

SEQ ID NO: 2116873 - DNA, 15 bp, Homo sapiens
atctatcttgctgtg

SEQ ID NO: 2116874 - DNA, 15 bp, Homo sapiens
tctatcttgctgtgt

SEQ ID NO: 2116875 - DNA, 15 bp, Homo sapiens
ctatcttgctgtgtg

SEQ ID NO: 2116876 - DNA, 15 bp, Homo sapiens
tatcttgctgtgtgg

SEQ ID NO: 2116877 - DNA, 15 bp, Homo sapiens
atcttgctgtgtggt

SEQ ID NO: 2116878 - DNA, 15 bp, Homo sapiens
tcttgctgtgtggtg

SEQ ID NO: 2116879 - DNA, 15 bp, Homo sapiens
cttgctgtgtggtga

SEQ ID NO: 2116880 - DNA, 15 bp, Homo sapiens
ttgctgtgtggtgag

SEQ ID NO: 2116881 - DNA, 15 bp, Homo sapiens
tgctgtgtggtgaga

SEQ ID NO: 2116882 - DNA, 15 bp, Homo sapiens
gctgtgtggtgagaa

SEQ ID NO: 2116883 - DNA, 15 bp, Homo sapiens
ctgtgtggtgagaaa

SEQ ID NO: 2116884 - DNA, 15 bp, Homo sapiens
tgtgtggtgagaaaa

SEQ ID NO: 2116885 - DNA, 15 bp, Homo sapiens
gtgtggtgagaaaag

SEQ ID NO: 2116886 - DNA, 15 bp, Homo sapiens
tgtggtgagaaaaga

SEQ ID NO: 2116887 - DNA, 15 bp, Homo sapiens
gtggtgagaaaagaa

SEQ ID NO: 2116888 - DNA, 15 bp, Homo sapiens
tggtgagaaaagaaa

SEQ ID NO: 2116889 - DNA, 15 bp, Homo sapiens
ggtgagaaaagaaat

SEQ ID NO: 2116890 - DNA, 15 bp, Homo sapiens
gtgagaaaagaaata

SEQ ID NO: 2116891 - DNA, 15 bp, Homo sapiens
tgagaaaagaaataa

SEQ ID NO: 2116892 - DNA, 15 bp, Homo sapiens
gagaaaagaaataat

SEQ ID NO: 2116893 - DNA, 15 bp, Homo sapiens
agaaaagaaataatt

SEQ ID NO: 2116894 - DNA, 15 bp, Homo sapiens
gaaaagaaataattt

SEQ ID NO: 2116895 - DNA, 15 bp, Homo sapiens
aaaagaaataattta

SEQ ID NO: 2116896 - DNA, 15 bp, Homo sapiens
aaagaaataatttag

SEQ ID NO: 2116897 - DNA, 15 bp, Homo sapiens
aagaaataatttagt

SEQ ID NO: 2116898 - DNA, 15 bp, Homo sapiens
agaaataatttagtg

SEQ ID NO: 2116899 - DNA, 15 bp, Homo sapiens
gaaataatttagtgc

SEQ ID NO: 2116900 - DNA, 15 bp, Homo sapiens
aaataatttagtgct

SEQ ID NO: 2116901 - DNA, 15 bp, Homo sapiens
aataatttagtgctt

SEQ ID NO: 2116902 - DNA, 15 bp, Homo sapiens
ataatttagtgcttt

SEQ ID NO: 2116903 - DNA, 15 bp, Homo sapiens
taatttagtgctttg

SEQ ID NO: 2116904 - DNA, 15 bp, Homo sapiens
aatttagtgctttgc

SEQ ID NO: 2116905 - DNA, 15 bp, Homo sapiens
atttagtgctttgca

SEQ ID NO: 2116906 - DNA, 15 bp, Homo sapiens
tttagtgctttgcat

SEQ ID NO: 2116907 - DNA, 15 bp, Homo sapiens
ttagtgctttgcatc

SEQ ID NO: 2116908 - DNA, 15 bp, Homo sapiens
tagtgctttgcatct

SEQ ID NO: 2116909 - DNA, 15 bp, Homo sapiens
agtgctttgcatctc

SEQ ID NO: 2116910 - DNA, 15 bp, Homo sapiens
gtgctttgcatctct

SEQ ID NO: 2116911 - DNA, 15 bp, Homo sapiens
tgctttgcatctctc

SEQ ID NO: 2116912 - DNA, 15 bp, Homo sapiens
gctttgcatctctca

SEQ ID NO: 2116913 - DNA, 15 bp, Homo sapiens
ctttgcatctctcat

SEQ ID NO: 2116914 - DNA, 15 bp, Homo sapiens
tttgcatctctcatt

SEQ ID NO: 2116915 - DNA, 15 bp, Homo sapiens
ttgcatctctcattc

SEQ ID NO: 2116916 - DNA, 15 bp, Homo sapiens
tgcatctctcattct

SEQ ID NO: 2116917 - DNA, 15 bp, Homo sapiens
gcatctctcattctt

SEQ ID NO: 2116918 - DNA, 15 bp, Homo sapiens
catctctcattcttc

SEQ ID NO: 2116919 - DNA, 15 bp, Homo sapiens
atctctcattcttca

SEQ ID NO: 2116920 - DNA, 15 bp, Homo sapiens
tctctcattcttcat

SEQ ID NO: 2116921 - DNA, 15 bp, Homo sapiens
ctctcattcttcatt

SEQ ID NO: 2116922 - DNA, 15 bp, Homo sapiens
tctcattcttcattg

SEQ ID NO: 2116923 - DNA, 15 bp, Homo sapiens
ctcattcttcattgg

SEQ ID NO: 2116924 - DNA, 15 bp, Homo sapiens
tcattcttcattggg

SEQ ID NO: 2116925 - DNA, 15 bp, Homo sapiens
cattcttcattgggg

SEQ ID NO: 2116926 - DNA, 15 bp, Homo sapiens
attcttcattgggga

SEQ ID NO: 2116927 - DNA, 15 bp, Homo sapiens
ttcttcattggggat

SEQ ID NO: 2116928 - DNA, 15 bp, Homo sapiens
tcttcattggggatc

SEQ ID NO: 2116929 - DNA, 15 bp, Homo sapiens
cttcattggggatca

SEQ ID NO: 2116930 - DNA, 15 bp, Homo sapiens
ttcattggggatcaa

SEQ ID NO: 2116931 - DNA, 15 bp, Homo sapiens
tcattggggatcaag

SEQ ID NO: 2116932 - DNA, 15 bp, Homo sapiens
cattggggatcaagt

SEQ ID NO: 2116933 - DNA, 15 bp, Homo sapiens
attggggatcaagta

SEQ ID NO: 2116934 - DNA, 15 bp, Homo sapiens
ttggggatcaagtat

SEQ ID NO: 2116935 - DNA, 15 bp, Homo sapiens
tggggatcaagtatg

SEQ ID NO: 2116936 - DNA, 15 bp, Homo sapiens
ggggatcaagtatgc

SEQ ID NO: 2116937 - DNA, 15 bp, Homo sapiens
gggatcaagtatgct

SEQ ID NO: 2116938 - DNA, 15 bp, Homo sapiens
ggatcaagtatgctt

SEQ ID NO: 2116939 - DNA, 15 bp, Homo sapiens
gatcaagtatgcttg

SEQ ID NO: 2116940 - DNA, 15 bp, Homo sapiens
atcaagtatgcttgc

SEQ ID NO: 2116941 - DNA, 15 bp, Homo sapiens
tcaagtatgcttgcc

SEQ ID NO: 2116942 - DNA, 15 bp, Homo sapiens
caagtatgcttgccc

SEQ ID NO: 2116943 - DNA, 15 bp, Homo sapiens
aagtatgcttgccct

SEQ ID NO: 2116944 - DNA, 15 bp, Homo sapiens
agtatgcttgccctt

SEQ ID NO: 2116945 - DNA, 15 bp, Homo sapiens
gtatgcttgccctta

SEQ ID NO: 2116946 - DNA, 15 bp, Homo sapiens
tatgcttgcccttac

SEQ ID NO: 2116947 - DNA, 15 bp, Homo sapiens
atgcttgcccttaca

SEQ ID NO: 2116948 - DNA, 15 bp, Homo sapiens
tgcttgcccttacag

SEQ ID NO: 2116949 - DNA, 15 bp, Homo sapiens
gcttgcccttacaga

SEQ ID NO: 2116950 - DNA, 15 bp, Homo sapiens
cttgcccttacagac

SEQ ID NO: 2116951 - DNA, 15 bp, Homo sapiens
ttgcccttacagacc

SEQ ID NO: 2116952 - DNA, 15 bp, Homo sapiens
tgcccttacagacct

SEQ ID NO: 2116953 - DNA, 15 bp, Homo sapiens
gcccttacagacctc

SEQ ID NO: 2116954 - DNA, 15 bp, Homo sapiens
cccttacagacctca

SEQ ID NO: 2116955 - DNA, 15 bp, Homo sapiens
ccttacagacctcac

SEQ ID NO: 2116956 - DNA, 15 bp, Homo sapiens
cttacagacctcact

SEQ ID NO: 2116957 - DNA, 15 bp, Homo sapiens
ttacagacctcactg

SEQ ID NO: 2116958 - DNA, 15 bp, Homo sapiens
tacagacctcactgg

SEQ ID NO: 2116959 - DNA, 15 bp, Homo sapiens
acagacctcactgga

SEQ ID NO: 2116960 - DNA, 15 bp, Homo sapiens
cagacctcactggag

SEQ ID NO: 2116961 - DNA, 15 bp, Homo sapiens
agacctcactggagc

SEQ ID NO: 2116962 - DNA, 15 bp, Homo sapiens
gacctcactggagcc

SEQ ID NO: 2116963 - DNA, 15 bp, Homo sapiens
acctcactggagccc

SEQ ID NO: 2116964 - DNA, 15 bp, Homo sapiens
cctcactggagccca

SEQ ID NO: 2116965 - DNA, 15 bp, Homo sapiens
ctcactggagcccag

SEQ ID NO: 2116966 - DNA, 15 bp, Homo sapiens
tcactggagcccagc

SEQ ID NO: 2116967 - DNA, 15 bp, Homo sapiens
cactggagcccagct

SEQ ID NO: 2116968 - DNA, 15 bp, Homo sapiens
actggagcccagctc

SEQ ID NO: 2116969 - DNA, 15 bp, Homo sapiens
ctggagcccagctct

SEQ ID NO: 2116970 - DNA, 15 bp, Homo sapiens
tggagcccagctctg

SEQ ID NO: 2116971 - DNA, 15 bp, Homo sapiens
ggagcccagctctga

SEQ ID NO: 2116972 - DNA, 15 bp, Homo sapiens
gagcccagctctgag

SEQ ID NO: 2116973 - DNA, 15 bp, Homo sapiens
agcccagctctgagg

SEQ ID NO: 2116974 - DNA, 15 bp, Homo sapiens
gcccagctctgaggg

SEQ ID NO: 2116975 - DNA, 15 bp, Homo sapiens
cccagctctgaggga

SEQ ID NO: 2116976 - DNA, 15 bp, Homo sapiens
ccagctctgagggat

SEQ ID NO: 2116977 - DNA, 15 bp, Homo sapiens
cagctctgagggata

SEQ ID NO: 2116978 - DNA, 15 bp, Homo sapiens
agctctgagggataa

SEQ ID NO: 2116979 - DNA, 15 bp, Homo sapiens
gctctgagggataaa

SEQ ID NO: 2116980 - DNA, 15 bp, Homo sapiens
ctctgagggataaat

SEQ ID NO: 2116981 - DNA, 15 bp, Homo sapiens
tctgagggataaatg

SEQ ID NO: 2116982 - DNA, 15 bp, Homo sapiens
ctgagggataaatga

SEQ ID NO: 2116983 - DNA, 15 bp, Homo sapiens
tgagggataaatgaa

SEQ ID NO: 2116984 - DNA, 15 bp, Homo sapiens
gagggataaatgaaa

SEQ ID NO: 2116985 - DNA, 15 bp, Homo sapiens
agggataaatgaaac

SEQ ID NO: 2116986 - DNA, 15 bp, Homo sapiens
gggataaatgaaaca

SEQ ID NO: 2116987 - DNA, 15 bp, Homo sapiens
ggataaatgaaacag

SEQ ID NO: 2116988 - DNA, 15 bp, Homo sapiens
gataaatgaaacagg

SEQ ID NO: 2116989 - DNA, 15 bp, Homo sapiens
ataaatgaaacaggc

SEQ ID NO: 2116990 - DNA, 15 bp, Homo sapiens
taaatgaaacaggcc

SEQ ID NO: 2116991 - DNA, 15 bp, Homo sapiens
aaatgaaacaggccg

SEQ ID NO: 2116992 - DNA, 15 bp, Homo sapiens
aatgaaacaggccga

SEQ ID NO: 2116993 - DNA, 15 bp, Homo sapiens
atgaaacaggccgaa

SEQ ID NO: 2116994 - DNA, 15 bp, Homo sapiens
tgaaacaggccgaac

SEQ ID NO: 2116995 - DNA, 15 bp, Homo sapiens
gaaacaggccgaact

SEQ ID NO: 2116996 - DNA, 15 bp, Homo sapiens
aaacaggccgaactc

SEQ ID NO: 2116997 - DNA, 15 bp, Homo sapiens
aacaggccgaactca

SEQ ID NO: 2116998 - DNA, 15 bp, Homo sapiens
acaggccgaactcat

SEQ ID NO: 2116999 - DNA, 15 bp, Homo sapiens
caggccgaactcatt

SEQ ID NO: 2117000 - DNA, 15 bp, Homo sapiens
aggccgaactcatta

SEQ ID NO: 2117001 - DNA, 15 bp, Homo sapiens
ggccgaactcattat

SEQ ID NO: 2117002 - DNA, 15 bp, Homo sapiens
gccgaactcattatg

SEQ ID NO: 2117003 - DNA, 15 bp, Homo sapiens
ccgaactcattatgt

SEQ ID NO: 2117004 - DNA, 15 bp, Homo sapiens
cgaactcattatgta

SEQ ID NO: 2117005 - DNA, 15 bp, Homo sapiens
gaactcattatgtaa

SEQ ID NO: 2117006 - DNA, 15 bp, Homo sapiens
aactcattatgtaaa

SEQ ID NO: 2117007 - DNA, 15 bp, Homo sapiens
actcattatgtaaag

SEQ ID NO: 2117008 - DNA, 15 bp, Homo sapiens
ctcattatgtaaagt

SEQ ID NO: 2117009 - DNA, 15 bp, Homo sapiens
tcattatgtaaagtt

SEQ ID NO: 2117010 - DNA, 15 bp, Homo sapiens
cattatgtaaagtta

SEQ ID NO: 2117011 - DNA, 15 bp, Homo sapiens
attatgtaaagttaa

SEQ ID NO: 2117012 - DNA, 15 bp, Homo sapiens
ttatgtaaagttaaa

SEQ ID NO: 2117013 - DNA, 15 bp, Homo sapiens
tatgtaaagttaaaa

SEQ ID NO: 2117014 - DNA, 15 bp, Homo sapiens
atgtaaagttaaaat

SEQ ID NO: 2117015 - DNA, 15 bp, Homo sapiens
tgtaaagttaaaatg

SEQ ID NO: 2117016 - DNA, 15 bp, Homo sapiens
gtaaagttaaaatgt

SEQ ID NO: 2117017 - DNA, 15 bp, Homo sapiens
taaagttaaaatgta

SEQ ID NO: 2117018 - DNA, 15 bp, Homo sapiens
aaagttaaaatgtat

SEQ ID NO: 2117019 - DNA, 15 bp, Homo sapiens
aagttaaaatgtatg

SEQ ID NO: 2117020 - DNA, 15 bp, Homo sapiens
agttaaaatgtatgt

SEQ ID NO: 2117021 - DNA, 15 bp, Homo sapiens
gttaaaatgtatgtg

SEQ ID NO: 2117022 - DNA, 15 bp, Homo sapiens
ttaaaatgtatgtgt

SEQ ID NO: 2117023 - DNA, 15 bp, Homo sapiens
taaaatgtatgtgta

SEQ ID NO: 2117024 - DNA, 15 bp, Homo sapiens
aaaatgtatgtgtac

SEQ ID NO: 2117025 - DNA, 15 bp, Homo sapiens
aaatgtatgtgtaca

SEQ ID NO: 2117026 - DNA, 15 bp, Homo sapiens
aatgtatgtgtacat

SEQ ID NO: 2117027 - DNA, 15 bp, Homo sapiens
atgtatgtgtacatg

SEQ ID NO: 2117028 - DNA, 15 bp, Homo sapiens
tgtatgtgtacatgc

SEQ ID NO: 2117029 - DNA, 15 bp, Homo sapiens
gtatgtgtacatgca

SEQ ID NO: 2117030 - DNA, 15 bp, Homo sapiens
tatgtgtacatgcaa

SEQ ID NO: 2117031 - DNA, 15 bp, Homo sapiens
atgtgtacatgcaaa

SEQ ID NO: 2117032 - DNA, 15 bp, Homo sapiens
tgtgtacatgcaaaa

SEQ ID NO: 2117033 - DNA, 15 bp, Homo sapiens
gtgtacatgcaaaag

SEQ ID NO: 2117034 - DNA, 15 bp, Homo sapiens
tgtacatgcaaaaga

SEQ ID NO: 2117035 - DNA, 15 bp, Homo sapiens
gtacatgcaaaagaa

SEQ ID NO: 2117036 - DNA, 15 bp, Homo sapiens
tacatgcaaaagaaa

SEQ ID NO: 2117037 - DNA, 15 bp, Homo sapiens
acatgcaaaagaaaa

SEQ ID NO: 2117038 - DNA, 15 bp, Homo sapiens
catgcaaaagaaaaa

SEQ ID NO: 2117039 - DNA, 15 bp, Homo sapiens
atgcaaaagaaaaag

SEQ ID NO: 2117040 - DNA, 15 bp, Homo sapiens
tgcaaaagaaaaagt

SEQ ID NO: 2117041 - DNA, 15 bp, Homo sapiens
gcaaaagaaaaagta

SEQ ID NO: 2117042 - DNA, 15 bp, Homo sapiens
caaaagaaaaagtat

SEQ ID NO: 2117043 - DNA, 15 bp, Homo sapiens
aaaagaaaaagtata

SEQ ID NO: 2117044 - DNA, 15 bp, Homo sapiens
aaagaaaaagtatag

SEQ ID NO: 2117045 - DNA, 15 bp, Homo sapiens
aagaaaaagtatagg

SEQ ID NO: 2117046 - DNA, 15 bp, Homo sapiens
agaaaaagtatagga

SEQ ID NO: 2117047 - DNA, 15 bp, Homo sapiens
gaaaaagtataggaa

SEQ ID NO: 2117048 - DNA, 15 bp, Homo sapiens
aaaaagtataggaat

SEQ ID NO: 2117049 - DNA, 15 bp, Homo sapiens
aaaagtataggaatt

SEQ ID NO: 2117050 - DNA, 15 bp, Homo sapiens
aaagtataggaattg

SEQ ID NO: 2117051 - DNA, 15 bp, Homo sapiens
aagtataggaattga

SEQ ID NO: 2117052 - DNA, 15 bp, Homo sapiens
agtataggaattgat

SEQ ID NO: 2117053 - DNA, 15 bp, Homo sapiens
gtataggaattgatg

SEQ ID NO: 2117054 - DNA, 15 bp, Homo sapiens
tataggaattgatga

SEQ ID NO: 2117055 - DNA, 15 bp, Homo sapiens
ataggaattgatgaa

SEQ ID NO: 2117056 - DNA, 15 bp, Homo sapiens
taggaattgatgaaa

SEQ ID NO: 2117057 - DNA, 15 bp, Homo sapiens
aggaattgatgaaaa

SEQ ID NO: 2117058 - DNA, 15 bp, Homo sapiens
ggaattgatgaaaac

SEQ ID NO: 2117059 - DNA, 15 bp, Homo sapiens
gaattgatgaaaact

SEQ ID NO: 2117060 - DNA, 15 bp, Homo sapiens
aattgatgaaaactg

SEQ ID NO: 2117061 - DNA, 15 bp, Homo sapiens
attgatgaaaactgg

SEQ ID NO: 2117062 - DNA, 15 bp, Homo sapiens
ttgatgaaaactggc

SEQ ID NO: 2117063 - DNA, 15 bp, Homo sapiens
tgatgaaaactggct

SEQ ID NO: 2117064 - DNA, 15 bp, Homo sapiens
gatgaaaactggctc

SEQ ID NO: 2117065 - DNA, 15 bp, Homo sapiens
atgaaaactggctca

SEQ ID NO: 2117066 - DNA, 15 bp, Homo sapiens
tgaaaactggctcac

SEQ ID NO: 2117067 - DNA, 15 bp, Homo sapiens
gaaaactggctcacg

SEQ ID NO: 2117068 - DNA, 15 bp, Homo sapiens
aaaactggctcacgt

SEQ ID NO: 2117069 - DNA, 15 bp, Homo sapiens
aaactggctcacgtt

SEQ ID NO: 2117070 - DNA, 15 bp, Homo sapiens
aactggctcacgttc

SEQ ID NO: 2117071 - DNA, 15 bp, Homo sapiens
actggctcacgttct

SEQ ID NO: 2117072 - DNA, 15 bp, Homo sapiens
ctggctcacgttctg

SEQ ID NO: 2117073 - DNA, 15 bp, Homo sapiens
tggctcacgttctgc

SEQ ID NO: 2117074 - DNA, 15 bp, Homo sapiens
ggctcacgttctgct

SEQ ID NO: 2117075 - DNA, 15 bp, Homo sapiens
gctcacgttctgctt

SEQ ID NO: 2117076 - DNA, 15 bp, Homo sapiens
ctcacgttctgcttt

SEQ ID NO: 2117077 - DNA, 15 bp, Homo sapiens
tcacgttctgctttt

SEQ ID NO: 2117078 - DNA, 15 bp, Homo sapiens
cacgttctgcttttc

SEQ ID NO: 2117079 - DNA, 15 bp, Homo sapiens
acgttctgcttttct

SEQ ID NO: 2117080 - DNA, 15 bp, Homo sapiens
cgttctgcttttctt

SEQ ID NO: 2117081 - DNA, 15 bp, Homo sapiens
gttctgcttttcttt

SEQ ID NO: 2117082 - DNA, 15 bp, Homo sapiens
ttctgcttttctttc

SEQ ID NO: 2117083 - DNA, 15 bp, Homo sapiens
tctgcttttctttct

SEQ ID NO: 2117084 - DNA, 15 bp, Homo sapiens
ctgcttttctttctt

SEQ ID NO: 2117085 - DNA, 15 bp, Homo sapiens
tgcttttctttcttt

SEQ ID NO: 2117086 - DNA, 15 bp, Homo sapiens
gcttttctttctttt

SEQ ID NO: 2117087 - DNA, 15 bp, Homo sapiens
ttttctttcttttta

SEQ ID NO: 2117088 - DNA, 15 bp, Homo sapiens
ttctttctttttaag

SEQ ID NO: 2117089 - DNA, 15 bp, Homo sapiens
tctttctttttaaga

SEQ ID NO: 2117090 - DNA, 15 bp, Homo sapiens
ctttctttttaagag

SEQ ID NO: 2117091 - DNA, 15 bp, Homo sapiens
tttctttttaagaga

SEQ ID NO: 2117092 - DNA, 15 bp, Homo sapiens
ttctttttaagagac

SEQ ID NO: 2117093 - DNA, 15 bp, Homo sapiens
tctttttaagagact

SEQ ID NO: 2117094 - DNA, 15 bp, Homo sapiens
ctttttaagagactg

SEQ ID NO: 2117095 - DNA, 15 bp, Homo sapiens
tttttaagagactgg

SEQ ID NO: 2117096 - DNA, 15 bp, Homo sapiens
ttttaagagactggg

SEQ ID NO: 2117097 - DNA, 15 bp, Homo sapiens
tttaagagactgggt

SEQ ID NO: 2117098 - DNA, 15 bp, Homo sapiens
ttaagagactgggtc

SEQ ID NO: 2117099 - DNA, 15 bp, Homo sapiens
taagagactgggtcc

SEQ ID NO: 2117100 - DNA, 15 bp, Homo sapiens
aagagactgggtccc

SEQ ID NO: 2117101 - DNA, 15 bp, Homo sapiens
agagactgggtcccg

SEQ ID NO: 2117102 - DNA, 15 bp, Homo sapiens
gagactgggtcccgc

SEQ ID NO: 2117103 - DNA, 15 bp, Homo sapiens
agactgggtcccgct

SEQ ID NO: 2117104 - DNA, 15 bp, Homo sapiens
gactgggtcccgctc

SEQ ID NO: 2117105 - DNA, 15 bp, Homo sapiens
actgggtcccgctct

SEQ ID NO: 2117106 - DNA, 15 bp, Homo sapiens
ctgggtcccgctctg

SEQ ID NO: 2117107 - DNA, 15 bp, Homo sapiens
tgggtcccgctctgc

SEQ ID NO: 2117108 - DNA, 15 bp, Homo sapiens
gggtcccgctctgcc

SEQ ID NO: 2117109 - DNA, 15 bp, Homo sapiens
ggtcccgctctgcca

SEQ ID NO: 2117110 - DNA, 15 bp, Homo sapiens
gtcccgctctgccac

SEQ ID NO: 2117111 - DNA, 15 bp, Homo sapiens
tcccgctctgccacc

SEQ ID NO: 2117112 - DNA, 15 bp, Homo sapiens
cccgctctgccacct

SEQ ID NO: 2117113 - DNA, 15 bp, Homo sapiens
ccgctctgccaccta

SEQ ID NO: 2117114 - DNA, 15 bp, Homo sapiens
cgctctgccacctag

SEQ ID NO: 2117115 - DNA, 15 bp, Homo sapiens
gctctgccacctagg

SEQ ID NO: 2117116 - DNA, 15 bp, Homo sapiens
ctctgccacctaggc

SEQ ID NO: 2117117 - DNA, 15 bp, Homo sapiens
tctgccacctaggct

SEQ ID NO: 2117118 - DNA, 15 bp, Homo sapiens
ctgccacctaggctg

SEQ ID NO: 2117119 - DNA, 15 bp, Homo sapiens
tgccacctaggctgg

SEQ ID NO: 2117120 - DNA, 15 bp, Homo sapiens
gccacctaggctgga

SEQ ID NO: 2117121 - DNA, 15 bp, Homo sapiens
ccacctaggctggag

SEQ ID NO: 2117122 - DNA, 15 bp, Homo sapiens
taggctggagtgcag

SEQ ID NO: 2117123 - DNA, 15 bp, Homo sapiens
tggagtgcagtggct

SEQ ID NO: 2117124 - DNA, 15 bp, Homo sapiens
ggagtgcagtggcta

SEQ ID NO: 2117125 - DNA, 15 bp, Homo sapiens
gagtgcagtggctaa

SEQ ID NO: 2117126 - DNA, 15 bp, Homo sapiens
agtgcagtggctaat

SEQ ID NO: 2117127 - DNA, 15 bp, Homo sapiens
gtgcagtggctaatg

SEQ ID NO: 2117128 - DNA, 15 bp, Homo sapiens
tgcagtggctaatga

SEQ ID NO: 2117129 - DNA, 15 bp, Homo sapiens
gcagtggctaatgat

SEQ ID NO: 2117130 - DNA, 15 bp, Homo sapiens
cagtggctaatgatg

SEQ ID NO: 2117131 - DNA, 15 bp, Homo sapiens
agtggctaatgatgg

SEQ ID NO: 2117132 - DNA, 15 bp, Homo sapiens
gtggctaatgatggc

SEQ ID NO: 2117133 - DNA, 15 bp, Homo sapiens
tggctaatgatggct

SEQ ID NO: 2117134 - DNA, 15 bp, Homo sapiens
ggctaatgatggctc

SEQ ID NO: 2117135 - DNA, 15 bp, Homo sapiens
gctaatgatggctca

SEQ ID NO: 2117136 - DNA, 15 bp, Homo sapiens
ctaatgatggctcac

SEQ ID NO: 2117137 - DNA, 15 bp, Homo sapiens
taatgatggctcact

SEQ ID NO: 2117138 - DNA, 15 bp, Homo sapiens
aatgatggctcactg

SEQ ID NO: 2117139 - DNA, 15 bp, Homo sapiens
atgatggctcactgc

SEQ ID NO: 2117140 - DNA, 15 bp, Homo sapiens
tgatggctcactgca

SEQ ID NO: 2117141 - DNA, 15 bp, Homo sapiens
gatggctcactgcag

SEQ ID NO: 2117142 - DNA, 15 bp, Homo sapiens
caatcctgctgcctc

SEQ ID NO: 2117143 - DNA, 15 bp, Homo sapiens
aatcctgctgcctca

SEQ ID NO: 2117144 - DNA, 15 bp, Homo sapiens
atcctgctgcctcag

SEQ ID NO: 2117145 - DNA, 15 bp, Homo sapiens
tcctgctgcctcagc

SEQ ID NO: 2117146 - DNA, 15 bp, Homo sapiens
cctgctgcctcagcc

SEQ ID NO: 2117147 - DNA, 15 bp, Homo sapiens
ctgctgcctcagcct

SEQ ID NO: 2117148 - DNA, 15 bp, Homo sapiens
tgctgcctcagcctc

SEQ ID NO: 2117149 - DNA, 15 bp, Homo sapiens
gctgcctcagcctcc

SEQ ID NO: 2117150 - DNA, 15 bp, Homo sapiens
ctgcctcagcctcca

SEQ ID NO: 2117151 - DNA, 15 bp, Homo sapiens
tgcctcagcctccag

SEQ ID NO: 2117152 - DNA, 15 bp, Homo sapiens
gcctcagcctccaga

SEQ ID NO: 2117153 - DNA, 15 bp, Homo sapiens
agcctccagagtagg

SEQ ID NO: 2117154 - DNA, 15 bp, Homo sapiens
gcctccagagtaggt

SEQ ID NO: 2117155 - DNA, 15 bp, Homo sapiens
cctccagagtaggta

SEQ ID NO: 2117156 - DNA, 15 bp, Homo sapiens
ctccagagtaggtag

SEQ ID NO: 2117157 - DNA, 15 bp, Homo sapiens
tccagagtaggtagg

SEQ ID NO: 2117158 - DNA, 15 bp, Homo sapiens
ccagagtaggtagga

SEQ ID NO: 2117159 - DNA, 15 bp, Homo sapiens
cagagtaggtaggac

SEQ ID NO: 2117160 - DNA, 15 bp, Homo sapiens
agagtaggtaggact

SEQ ID NO: 2117161 - DNA, 15 bp, Homo sapiens
gagtaggtaggacta

SEQ ID NO: 2117162 - DNA, 15 bp, Homo sapiens
agtaggtaggactac

SEQ ID NO: 2117163 - DNA, 15 bp, Homo sapiens
gtaggtaggactaca

SEQ ID NO: 2117164 - DNA, 15 bp, Homo sapiens
taggtaggactacag

SEQ ID NO: 2117165 - DNA, 15 bp, Homo sapiens
aggtaggactacagg

SEQ ID NO: 2117166 - DNA, 15 bp, Homo sapiens
ggtaggactacaggc

SEQ ID NO: 2117167 - DNA, 15 bp, Homo sapiens
gtaggactacaggca

SEQ ID NO: 2117168 - DNA, 15 bp, Homo sapiens
taggactacaggcac

SEQ ID NO: 2117169 - DNA, 15 bp, Homo sapiens
aggactacaggcacg

SEQ ID NO: 2117170 - DNA, 15 bp, Homo sapiens
ggactacaggcacgt

SEQ ID NO: 2117171 - DNA, 15 bp, Homo sapiens
gactacaggcacgta

SEQ ID NO: 2117172 - DNA, 15 bp, Homo sapiens
actacaggcacgtac

SEQ ID NO: 2117173 - DNA, 15 bp, Homo sapiens
ctacaggcacgtacc

SEQ ID NO: 2117174 - DNA, 15 bp, Homo sapiens
tacaggcacgtacca

SEQ ID NO: 2117175 - DNA, 15 bp, Homo sapiens
acaggcacgtaccac

SEQ ID NO: 2117176 - DNA, 15 bp, Homo sapiens
caggcacgtaccacc

SEQ ID NO: 2117177 - DNA, 15 bp, Homo sapiens
aggcacgtaccacca

SEQ ID NO: 2117178 - DNA, 15 bp, Homo sapiens
ggcacgtaccaccat

SEQ ID NO: 2117179 - DNA, 15 bp, Homo sapiens
gcacgtaccaccatg

SEQ ID NO: 2117180 - DNA, 15 bp, Homo sapiens
cacgtaccaccatgc

SEQ ID NO: 2117181 - DNA, 15 bp, Homo sapiens
acgtaccaccatgcc

SEQ ID NO: 2117182 - DNA, 15 bp, Homo sapiens
cgtaccaccatgccc

SEQ ID NO: 2117183 - DNA, 15 bp, Homo sapiens
gtaccaccatgccca

SEQ ID NO: 2117184 - DNA, 15 bp, Homo sapiens
taccaccatgcccaa

SEQ ID NO: 2117185 - DNA, 15 bp, Homo sapiens
accaccatgcccaac

SEQ ID NO: 2117186 - DNA, 15 bp, Homo sapiens
ccaccatgcccaact

SEQ ID NO: 2117187 - DNA, 15 bp, Homo sapiens
caccatgcccaacta

SEQ ID NO: 2117188 - DNA, 15 bp, Homo sapiens
accatgcccaactaa

SEQ ID NO: 2117189 - DNA, 15 bp, Homo sapiens
ccatgcccaactaat

SEQ ID NO: 2117190 - DNA, 15 bp, Homo sapiens
catgcccaactaatt

SEQ ID NO: 2117191 - DNA, 15 bp, Homo sapiens
atgcccaactaattt

SEQ ID NO: 2117192 - DNA, 15 bp, Homo sapiens
tgcccaactaatttt

SEQ ID NO: 2117193 - DNA, 15 bp, Homo sapiens
gcccaactaatttta

SEQ ID NO: 2117194 - DNA, 15 bp, Homo sapiens
cccaactaattttat

SEQ ID NO: 2117195 - DNA, 15 bp, Homo sapiens
ccaactaattttatt

SEQ ID NO: 2117196 - DNA, 15 bp, Homo sapiens
caactaattttattt

SEQ ID NO: 2117197 - DNA, 15 bp, Homo sapiens
aactaattttatttt

SEQ ID NO: 2117198 - DNA, 15 bp, Homo sapiens
actaattttatttta

SEQ ID NO: 2117199 - DNA, 15 bp, Homo sapiens
ctaattttattttat

SEQ ID NO: 2117200 - DNA, 15 bp, Homo sapiens
ttttattttattgta

SEQ ID NO: 2117201 - DNA, 15 bp, Homo sapiens
tttattttattgtag

SEQ ID NO: 2117202 - DNA, 15 bp, Homo sapiens
ttattttattgtaga

SEQ ID NO: 2117203 - DNA, 15 bp, Homo sapiens
tattttattgtagag

SEQ ID NO: 2117204 - DNA, 15 bp, Homo sapiens
attttattgtagaga

SEQ ID NO: 2117205 - DNA, 15 bp, Homo sapiens
ttttattgtagagac

SEQ ID NO: 2117206 - DNA, 15 bp, Homo sapiens
tttattgtagagaca

SEQ ID NO: 2117207 - DNA, 15 bp, Homo sapiens
ttattgtagagacat

SEQ ID NO: 2117208 - DNA, 15 bp, Homo sapiens
tattgtagagacatg

SEQ ID NO: 2117209 - DNA, 15 bp, Homo sapiens
attgtagagacatgg

SEQ ID NO: 2117210 - DNA, 15 bp, Homo sapiens
ttgtagagacatggg

SEQ ID NO: 2117211 - DNA, 15 bp, Homo sapiens
tgtagagacatgggt

SEQ ID NO: 2117212 - DNA, 15 bp, Homo sapiens
gtagagacatgggtc

SEQ ID NO: 2117213 - DNA, 15 bp, Homo sapiens
tagagacatgggtct

SEQ ID NO: 2117214 - DNA, 15 bp, Homo sapiens
agagacatgggtctt

SEQ ID NO: 2117215 - DNA, 15 bp, Homo sapiens
gagacatgggtcttc

SEQ ID NO: 2117216 - DNA, 15 bp, Homo sapiens
agacatgggtcttca

SEQ ID NO: 2117217 - DNA, 15 bp, Homo sapiens
gacatgggtcttcaa

SEQ ID NO: 2117218 - DNA, 15 bp, Homo sapiens
acatgggtcttcaac

SEQ ID NO: 2117219 - DNA, 15 bp, Homo sapiens
catgggtcttcaact

SEQ ID NO: 2117220 - DNA, 15 bp, Homo sapiens
atgggtcttcaactc

SEQ ID NO: 2117221 - DNA, 15 bp, Homo sapiens
tgggtcttcaactcc

SEQ ID NO: 2117222 - DNA, 15 bp, Homo sapiens
gggtcttcaactcct

SEQ ID NO: 2117223 - DNA, 15 bp, Homo sapiens
ggtcttcaactcctg

SEQ ID NO: 2117224 - DNA, 15 bp, Homo sapiens
gtcttcaactcctgg

SEQ ID NO: 2117225 - DNA, 15 bp, Homo sapiens
tcttcaactcctggc

SEQ ID NO: 2117226 - DNA, 15 bp, Homo sapiens
cttcaactcctggcc

SEQ ID NO: 2117227 - DNA, 15 bp, Homo sapiens
ttcaactcctggcct

SEQ ID NO: 2117228 - DNA, 15 bp, Homo sapiens
tcaactcctggcctc

SEQ ID NO: 2117229 - DNA, 15 bp, Homo sapiens
caactcctggcctca

SEQ ID NO: 2117230 - DNA, 15 bp, Homo sapiens
cctcaagtgatcccc

SEQ ID NO: 2117231 - DNA, 15 bp, Homo sapiens
tcaagtgatcccccc

SEQ ID NO: 2117232 - DNA, 15 bp, Homo sapiens
caagtgatcccccca

SEQ ID NO: 2117233 - DNA, 15 bp, Homo sapiens
aagtgatccccccac

SEQ ID NO: 2117234 - DNA, 15 bp, Homo sapiens
agtgatccccccacc

SEQ ID NO: 2117235 - DNA, 15 bp, Homo sapiens
gtgatccccccacct

SEQ ID NO: 2117236 - DNA, 15 bp, Homo sapiens
tgatccccccacctc

SEQ ID NO: 2117237 - DNA, 15 bp, Homo sapiens
gatccccccacctca

SEQ ID NO: 2117238 - DNA, 15 bp, Homo sapiens
atccccccacctcaa

SEQ ID NO: 2117239 - DNA, 15 bp, Homo sapiens
tccccccacctcaac

SEQ ID NO: 2117240 - DNA, 15 bp, Homo sapiens
ccccccacctcaacc

SEQ ID NO: 2117241 - DNA, 15 bp, Homo sapiens
cccccacctcaacct

SEQ ID NO: 2117242 - DNA, 15 bp, Homo sapiens
ccccacctcaacctc

SEQ ID NO: 2117243 - DNA, 15 bp, Homo sapiens
tcaacctcccaaagc

SEQ ID NO: 2117244 - DNA, 15 bp, Homo sapiens
caacctcccaaagcc

SEQ ID NO: 2117245 - DNA, 15 bp, Homo sapiens
aacctcccaaagccc

SEQ ID NO: 2117246 - DNA, 15 bp, Homo sapiens
acctcccaaagccct

SEQ ID NO: 2117247 - DNA, 15 bp, Homo sapiens
cctcccaaagccctg

SEQ ID NO: 2117248 - DNA, 15 bp, Homo sapiens
ctcccaaagccctgg

SEQ ID NO: 2117249 - DNA, 15 bp, Homo sapiens
tcccaaagccctgga

SEQ ID NO: 2117250 - DNA, 15 bp, Homo sapiens
cccaaagccctggaa

SEQ ID NO: 2117251 - DNA, 15 bp, Homo sapiens
ccaaagccctggaat

SEQ ID NO: 2117252 - DNA, 15 bp, Homo sapiens
caaagccctggaatt

SEQ ID NO: 2117253 - DNA, 15 bp, Homo sapiens
aaagccctggaatta

SEQ ID NO: 2117254 - DNA, 15 bp, Homo sapiens
aagccctggaattac

SEQ ID NO: 2117255 - DNA, 15 bp, Homo sapiens
agccctggaattaca

SEQ ID NO: 2117256 - DNA, 15 bp, Homo sapiens
gccctggaattacaa

SEQ ID NO: 2117257 - DNA, 15 bp, Homo sapiens
ccctggaattacaag

SEQ ID NO: 2117258 - DNA, 15 bp, Homo sapiens
cctggaattacaagc

SEQ ID NO: 2117259 - DNA, 15 bp, Homo sapiens
ctggaattacaagca

SEQ ID NO: 2117260 - DNA, 15 bp, Homo sapiens
tggaattacaagcag

SEQ ID NO: 2117261 - DNA, 15 bp, Homo sapiens
ggaattacaagcagg

SEQ ID NO: 2117262 - DNA, 15 bp, Homo sapiens
gaattacaagcagga

SEQ ID NO: 2117263 - DNA, 15 bp, Homo sapiens
aattacaagcaggag

SEQ ID NO: 2117264 - DNA, 15 bp, Homo sapiens
attacaagcaggagc

SEQ ID NO: 2117265 - DNA, 15 bp, Homo sapiens
ttacaagcaggagcc

SEQ ID NO: 2117266 - DNA, 15 bp, Homo sapiens
tacaagcaggagcca

SEQ ID NO: 2117267 - DNA, 15 bp, Homo sapiens
acaagcaggagccac

SEQ ID NO: 2117268 - DNA, 15 bp, Homo sapiens
caagcaggagccacc

SEQ ID NO: 2117269 - DNA, 15 bp, Homo sapiens
aagcaggagccacca

SEQ ID NO: 2117270 - DNA, 15 bp, Homo sapiens
agcaggagccaccat

SEQ ID NO: 2117271 - DNA, 15 bp, Homo sapiens
gcaggagccaccatg

SEQ ID NO: 2117272 - DNA, 15 bp, Homo sapiens
caggagccaccatgc

SEQ ID NO: 2117273 - DNA, 15 bp, Homo sapiens
aggagccaccatgcc

SEQ ID NO: 2117274 - DNA, 15 bp, Homo sapiens
ggagccaccatgccc

SEQ ID NO: 2117275 - DNA, 15 bp, Homo sapiens
atgcccagctgtgtt

SEQ ID NO: 2117276 - DNA, 15 bp, Homo sapiens
tgcccagctgtgttc

SEQ ID NO: 2117277 - DNA, 15 bp, Homo sapiens
gcccagctgtgttct

SEQ ID NO: 2117278 - DNA, 15 bp, Homo sapiens
cccagctgtgttctg

SEQ ID NO: 2117279 - DNA, 15 bp, Homo sapiens
ccagctgtgttctgc

SEQ ID NO: 2117280 - DNA, 15 bp, Homo sapiens
cagctgtgttctgct

SEQ ID NO: 2117281 - DNA, 15 bp, Homo sapiens
agctgtgttctgctt

SEQ ID NO: 2117282 - DNA, 15 bp, Homo sapiens
gctgtgttctgcttt

SEQ ID NO: 2117283 - DNA, 15 bp, Homo sapiens
ctgtgttctgcttta

SEQ ID NO: 2117284 - DNA, 15 bp, Homo sapiens
tgtgttctgctttaa

SEQ ID NO: 2117285 - DNA, 15 bp, Homo sapiens
gtgttctgctttaaa

SEQ ID NO: 2117286 - DNA, 15 bp, Homo sapiens
tgttctgctttaaaa

SEQ ID NO: 2117287 - DNA, 15 bp, Homo sapiens
gttctgctttaaaaa

SEQ ID NO: 2117288 - DNA, 15 bp, Homo sapiens
ttctgctttaaaaag

SEQ ID NO: 2117289 - DNA, 15 bp, Homo sapiens
tctgctttaaaaagg

SEQ ID NO: 2117290 - DNA, 15 bp, Homo sapiens
ctgctttaaaaagga

SEQ ID NO: 2117291 - DNA, 15 bp, Homo sapiens
tgctttaaaaaggag

SEQ ID NO: 2117292 - DNA, 15 bp, Homo sapiens
gctttaaaaaggaga

SEQ ID NO: 2117293 - DNA, 15 bp, Homo sapiens
ctttaaaaaggagag

SEQ ID NO: 2117294 - DNA, 15 bp, Homo sapiens
tttaaaaaggagagt

SEQ ID NO: 2117295 - DNA, 15 bp, Homo sapiens
ttaaaaaggagagtt

SEQ ID NO: 2117296 - DNA, 15 bp, Homo sapiens
taaaaaggagagttg

SEQ ID NO: 2117297 - DNA, 15 bp, Homo sapiens
aaaaaggagagttgt

SEQ ID NO: 2117298 - DNA, 15 bp, Homo sapiens
aaaaggagagttgtg

SEQ ID NO: 2117299 - DNA, 15 bp, Homo sapiens
aaaggagagttgtgg

SEQ ID NO: 2117300 - DNA, 15 bp, Homo sapiens
aaggagagttgtggg

SEQ ID NO: 2117301 - DNA, 15 bp, Homo sapiens
aggagagttgtggga

SEQ ID NO: 2117302 - DNA, 15 bp, Homo sapiens
ggagagttgtgggaa

SEQ ID NO: 2117303 - DNA, 15 bp, Homo sapiens
gagagttgtgggaag

SEQ ID NO: 2117304 - DNA, 15 bp, Homo sapiens
agagttgtgggaagt

SEQ ID NO: 2117305 - DNA, 15 bp, Homo sapiens
gagttgtgggaagtt

SEQ ID NO: 2117306 - DNA, 15 bp, Homo sapiens
agttgtgggaagttc

SEQ ID NO: 2117307 - DNA, 15 bp, Homo sapiens
gttgtgggaagttca

SEQ ID NO: 2117308 - DNA, 15 bp, Homo sapiens
ttgtgggaagttcaa

SEQ ID NO: 2117309 - DNA, 15 bp, Homo sapiens
tgtgggaagttcaat

SEQ ID NO: 2117310 - DNA, 15 bp, Homo sapiens
gtgggaagttcaatc

SEQ ID NO: 2117311 - DNA, 15 bp, Homo sapiens
tgggaagttcaatcc

SEQ ID NO: 2117312 - DNA, 15 bp, Homo sapiens
gggaagttcaatcca

SEQ ID NO: 2117313 - DNA, 15 bp, Homo sapiens
ggaagttcaatccaa

SEQ ID NO: 2117314 - DNA, 15 bp, Homo sapiens
gaagttcaatccaaa

SEQ ID NO: 2117315 - DNA, 15 bp, Homo sapiens
aagttcaatccaaag

SEQ ID NO: 2117316 - DNA, 15 bp, Homo sapiens
agttcaatccaaaga

SEQ ID NO: 2117317 - DNA, 15 bp, Homo sapiens
gttcaatccaaagac

SEQ ID NO: 2117318 - DNA, 15 bp, Homo sapiens
ttcaatccaaagaca

SEQ ID NO: 2117319 - DNA, 15 bp, Homo sapiens
tcaatccaaagacag

SEQ ID NO: 2117320 - DNA, 15 bp, Homo sapiens
caatccaaagacaga

SEQ ID NO: 2117321 - DNA, 15 bp, Homo sapiens
aatccaaagacagaa

SEQ ID NO: 2117322 - DNA, 15 bp, Homo sapiens
atccaaagacagaag

SEQ ID NO: 2117323 - DNA, 15 bp, Homo sapiens
tccaaagacagaagc

SEQ ID NO: 2117324 - DNA, 15 bp, Homo sapiens
ccaaagacagaagca

SEQ ID NO: 2117325 - DNA, 15 bp, Homo sapiens
caaagacagaagcac

SEQ ID NO: 2117326 - DNA, 15 bp, Homo sapiens
aaagacagaagcact

SEQ ID NO: 2117327 - DNA, 15 bp, Homo sapiens
aagacagaagcacta

SEQ ID NO: 2117328 - DNA, 15 bp, Homo sapiens
agacagaagcactac

SEQ ID NO: 2117329 - DNA, 15 bp, Homo sapiens
gacagaagcactaca

SEQ ID NO: 2117330 - DNA, 15 bp, Homo sapiens
acagaagcactacaa

SEQ ID NO: 2117331 - DNA, 15 bp, Homo sapiens
cagaagcactacaac

SEQ ID NO: 2117332 - DNA, 15 bp, Homo sapiens
agaagcactacaaca

SEQ ID NO: 2117333 - DNA, 15 bp, Homo sapiens
gaagcactacaacaa

SEQ ID NO: 2117334 - DNA, 15 bp, Homo sapiens
aagcactacaacaat

SEQ ID NO: 2117335 - DNA, 15 bp, Homo sapiens
agcactacaacaata

SEQ ID NO: 2117336 - DNA, 15 bp, Homo sapiens
gcactacaacaataa

SEQ ID NO: 2117337 - DNA, 15 bp, Homo sapiens
cactacaacaataaa

SEQ ID NO: 2117338 - DNA, 15 bp, Homo sapiens
actacaacaataaat

SEQ ID NO: 2117339 - DNA, 15 bp, Homo sapiens
ctacaacaataaatt

SEQ ID NO: 2117340 - DNA, 15 bp, Homo sapiens
tacaacaataaattc

SEQ ID NO: 2117341 - DNA, 15 bp, Homo sapiens
acaacaataaattcc

SEQ ID NO: 2117342 - DNA, 15 bp, Homo sapiens
caacaataaattccc

SEQ ID NO: 2117343 - DNA, 15 bp, Homo sapiens
aacaataaattcccc

SEQ ID NO: 2117344 - DNA, 15 bp, Homo sapiens
acaataaattcccca

SEQ ID NO: 2117345 - DNA, 15 bp, Homo sapiens
caataaattccccaa

SEQ ID NO: 2117346 - DNA, 15 bp, Homo sapiens
aataaattccccaaa

SEQ ID NO: 2117347 - DNA, 15 bp, Homo sapiens
ataaattccccaaac

SEQ ID NO: 2117348 - DNA, 15 bp, Homo sapiens
taaattccccaaact

SEQ ID NO: 2117349 - DNA, 15 bp, Homo sapiens
aaattccccaaacta

SEQ ID NO: 2117350 - DNA, 15 bp, Homo sapiens
aattccccaaactac

SEQ ID NO: 2117351 - DNA, 15 bp, Homo sapiens
attccccaaactacc

SEQ ID NO: 2117352 - DNA, 15 bp, Homo sapiens
ttccccaaactacct

SEQ ID NO: 2117353 - DNA, 15 bp, Homo sapiens
tccccaaactacctt

SEQ ID NO: 2117354 - DNA, 15 bp, Homo sapiens
ccccaaactaccttt

SEQ ID NO: 2117355 - DNA, 15 bp, Homo sapiens
cccaaactacctttt

SEQ ID NO: 2117356 - DNA, 15 bp, Homo sapiens
ccaaactaccttttt

SEQ ID NO: 2117357 - DNA, 15 bp, Homo sapiens
caaactacctttttc

SEQ ID NO: 2117358 - DNA, 15 bp, Homo sapiens
aaactacctttttct

SEQ ID NO: 2117359 - DNA, 15 bp, Homo sapiens
aactacctttttctc

SEQ ID NO: 2117360 - DNA, 15 bp, Homo sapiens
actacctttttctcc

SEQ ID NO: 2117361 - DNA, 15 bp, Homo sapiens
ctacctttttctcca

SEQ ID NO: 2117362 - DNA, 15 bp, Homo sapiens
tacctttttctccag

SEQ ID NO: 2117363 - DNA, 15 bp, Homo sapiens
acctttttctccaga

SEQ ID NO: 2117364 - DNA, 15 bp, Homo sapiens
cctttttctccagat

SEQ ID NO: 2117365 - DNA, 15 bp, Homo sapiens
ctttttctccagata

SEQ ID NO: 2117366 - DNA, 15 bp, Homo sapiens
tttttctccagatag

SEQ ID NO: 2117367 - DNA, 15 bp, Homo sapiens
ttttctccagatagc

SEQ ID NO: 2117368 - DNA, 15 bp, Homo sapiens
tttctccagatagct

SEQ ID NO: 2117369 - DNA, 15 bp, Homo sapiens
ttctccagatagctg

SEQ ID NO: 2117370 - DNA, 15 bp, Homo sapiens
tctccagatagctgg

SEQ ID NO: 2117371 - DNA, 15 bp, Homo sapiens
ctccagatagctggc

SEQ ID NO: 2117372 - DNA, 15 bp, Homo sapiens
tccagatagctggca

SEQ ID NO: 2117373 - DNA, 15 bp, Homo sapiens
ccagatagctggcaa

SEQ ID NO: 2117374 - DNA, 15 bp, Homo sapiens
cagatagctggcaac

SEQ ID NO: 2117375 - DNA, 15 bp, Homo sapiens
agatagctggcaacc

SEQ ID NO: 2117376 - DNA, 15 bp, Homo sapiens
gatagctggcaaccc

SEQ ID NO: 2117377 - DNA, 15 bp, Homo sapiens
atagctggcaaccca

SEQ ID NO: 2117378 - DNA, 15 bp, Homo sapiens
tagctggcaacccat

SEQ ID NO: 2117379 - DNA, 15 bp, Homo sapiens
agctggcaacccatc

SEQ ID NO: 2117380 - DNA, 15 bp, Homo sapiens
gctggcaacccatcc

SEQ ID NO: 2117381 - DNA, 15 bp, Homo sapiens
ctggcaacccatcca

SEQ ID NO: 2117382 - DNA, 15 bp, Homo sapiens
tggcaacccatccaa

SEQ ID NO: 2117383 - DNA, 15 bp, Homo sapiens
atgttctcaatataa

SEQ ID NO: 2117384 - DNA, 15 bp, Homo sapiens
tgttctcaatataag

SEQ ID NO: 2117385 - DNA, 15 bp, Homo sapiens
gttctcaatataagc

SEQ ID NO: 2117386 - DNA, 15 bp, Homo sapiens
ttctcaatataagca

SEQ ID NO: 2117387 - DNA, 15 bp, Homo sapiens
tctcaatataagcag

SEQ ID NO: 2117388 - DNA, 15 bp, Homo sapiens
ctcaatataagcaga

SEQ ID NO: 2117389 - DNA, 15 bp, Homo sapiens
tcaatataagcagaa

SEQ ID NO: 2117390 - DNA, 15 bp, Homo sapiens
caatataagcagaac

SEQ ID NO: 2117391 - DNA, 15 bp, Homo sapiens
aatataagcagaaca

SEQ ID NO: 2117392 - DNA, 15 bp, Homo sapiens
atataagcagaacaa

SEQ ID NO: 2117393 - DNA, 15 bp, Homo sapiens
tataagcagaacaag

SEQ ID NO: 2117394 - DNA, 15 bp, Homo sapiens
ataagcagaacaagc

SEQ ID NO: 2117395 - DNA, 15 bp, Homo sapiens
taagcagaacaagct

SEQ ID NO: 2117396 - DNA, 15 bp, Homo sapiens
aagcagaacaagctt

SEQ ID NO: 2117397 - DNA, 15 bp, Homo sapiens
agcagaacaagcttc

SEQ ID NO: 2117398 - DNA, 15 bp, Homo sapiens
gcagaacaagcttca

SEQ ID NO: 2117399 - DNA, 15 bp, Homo sapiens
cagaacaagcttcaa

SEQ ID NO: 2117400 - DNA, 15 bp, Homo sapiens
agaacaagcttcaaa

SEQ ID NO: 2117401 - DNA, 15 bp, Homo sapiens
gaacaagcttcaaaa

SEQ ID NO: 2117402 - DNA, 15 bp, Homo sapiens
aacaagcttcaaaat

SEQ ID NO: 2117403 - DNA, 15 bp, Homo sapiens
acaagcttcaaaatc

SEQ ID NO: 2117404 - DNA, 15 bp, Homo sapiens
caagcttcaaaatct

SEQ ID NO: 2117405 - DNA, 15 bp, Homo sapiens
aagcttcaaaatctc

SEQ ID NO: 2117406 - DNA, 15 bp, Homo sapiens
agcttcaaaatctct

SEQ ID NO: 2117407 - DNA, 15 bp, Homo sapiens
gcttcaaaatctctt

SEQ ID NO: 2117408 - DNA, 15 bp, Homo sapiens
cttcaaaatctcttg

SEQ ID NO: 2117409 - DNA, 15 bp, Homo sapiens
ttcaaaatctcttgc

SEQ ID NO: 2117410 - DNA, 15 bp, Homo sapiens
tcaaaatctcttgcc

SEQ ID NO: 2117411 - DNA, 15 bp, Homo sapiens
caaaatctcttgcca

SEQ ID NO: 2117412 - DNA, 15 bp, Homo sapiens
aaaatctcttgccaa

SEQ ID NO: 2117413 - DNA, 15 bp, Homo sapiens
aaatctcttgccaac

SEQ ID NO: 2117414 - DNA, 15 bp, Homo sapiens
aatctcttgccaaca

SEQ ID NO: 2117415 - DNA, 15 bp, Homo sapiens
atctcttgccaacat

SEQ ID NO: 2117416 - DNA, 15 bp, Homo sapiens
tctcttgccaacatc

SEQ ID NO: 2117417 - DNA, 15 bp, Homo sapiens
ctcttgccaacatcc

SEQ ID NO: 2117418 - DNA, 15 bp, Homo sapiens
tcttgccaacatcct

SEQ ID NO: 2117419 - DNA, 15 bp, Homo sapiens
cttgccaacatcctt

SEQ ID NO: 2117420 - DNA, 15 bp, Homo sapiens
ttgccaacatccttc

SEQ ID NO: 2117421 - DNA, 15 bp, Homo sapiens
tgccaacatccttcc

SEQ ID NO: 2117422 - DNA, 15 bp, Homo sapiens
gccaacatccttccc

SEQ ID NO: 2117423 - DNA, 15 bp, Homo sapiens
ccaacatccttcccc

SEQ ID NO: 2117424 - DNA, 15 bp, Homo sapiens
caacatccttcccca

SEQ ID NO: 2117425 - DNA, 15 bp, Homo sapiens
aacatccttccccat

SEQ ID NO: 2117426 - DNA, 15 bp, Homo sapiens
acatccttccccatc

SEQ ID NO: 2117427 - DNA, 15 bp, Homo sapiens
catccttccccatcc

SEQ ID NO: 2117428 - DNA, 15 bp, Homo sapiens
atccttccccatcct

SEQ ID NO: 2117429 - DNA, 15 bp, Homo sapiens
tccttccccatccta

SEQ ID NO: 2117430 - DNA, 15 bp, Homo sapiens
ccttccccatcctaa

SEQ ID NO: 2117431 - DNA, 15 bp, Homo sapiens
cttccccatcctaat

SEQ ID NO: 2117432 - DNA, 15 bp, Homo sapiens
ttccccatcctaatt

SEQ ID NO: 2117433 - DNA, 15 bp, Homo sapiens
tccccatcctaattt

SEQ ID NO: 2117434 - DNA, 15 bp, Homo sapiens
ccccatcctaattta

SEQ ID NO: 2117435 - DNA, 15 bp, Homo sapiens
cccatcctaatttaa

SEQ ID NO: 2117436 - DNA, 15 bp, Homo sapiens
ccatcctaatttaat

SEQ ID NO: 2117437 - DNA, 15 bp, Homo sapiens
catcctaatttaatc

SEQ ID NO: 2117438 - DNA, 15 bp, Homo sapiens
atcctaatttaatct

SEQ ID NO: 2117439 - DNA, 15 bp, Homo sapiens
tcctaatttaatcta

SEQ ID NO: 2117440 - DNA, 15 bp, Homo sapiens
cctaatttaatctaa

SEQ ID NO: 2117441 - DNA, 15 bp, Homo sapiens
ctaatttaatctaag

SEQ ID NO: 2117442 - DNA, 15 bp, Homo sapiens
taatttaatctaaga

SEQ ID NO: 2117443 - DNA, 15 bp, Homo sapiens
aatttaatctaagat

SEQ ID NO: 2117444 - DNA, 15 bp, Homo sapiens
atttaatctaagatt

SEQ ID NO: 2117445 - DNA, 15 bp, Homo sapiens
tttaatctaagatta

SEQ ID NO: 2117446 - DNA, 15 bp, Homo sapiens
ttaatctaagattag

SEQ ID NO: 2117447 - DNA, 15 bp, Homo sapiens
taatctaagattaga

SEQ ID NO: 2117448 - DNA, 15 bp, Homo sapiens
aatctaagattagat

SEQ ID NO: 2117449 - DNA, 15 bp, Homo sapiens
atctaagattagata

SEQ ID NO: 2117450 - DNA, 15 bp, Homo sapiens
tctaagattagatac

SEQ ID NO: 2117451 - DNA, 15 bp, Homo sapiens
ctaagattagatact

SEQ ID NO: 2117452 - DNA, 15 bp, Homo sapiens
taagattagatactt

SEQ ID NO: 2117453 - DNA, 15 bp, Homo sapiens
aagattagatacttg

SEQ ID NO: 2117454 - DNA, 15 bp, Homo sapiens
agattagatacttga

SEQ ID NO: 2117455 - DNA, 15 bp, Homo sapiens
gattagatacttgac

SEQ ID NO: 2117456 - DNA, 15 bp, Homo sapiens
attagatacttgact

SEQ ID NO: 2117457 - DNA, 15 bp, Homo sapiens
ttagatacttgactt

SEQ ID NO: 2117458 - DNA, 15 bp, Homo sapiens
tagatacttgacttc

SEQ ID NO: 2117459 - DNA, 15 bp, Homo sapiens
agatacttgacttcc

SEQ ID NO: 2117460 - DNA, 15 bp, Homo sapiens
gatacttgacttcca

SEQ ID NO: 2117461 - DNA, 15 bp, Homo sapiens
atacttgacttccaa

SEQ ID NO: 2117462 - DNA, 15 bp, Homo sapiens
tacttgacttccaaa

SEQ ID NO: 2117463 - DNA, 15 bp, Homo sapiens
acttgacttccaaat

SEQ ID NO: 2117464 - DNA, 15 bp, Homo sapiens
cttgacttccaaatg

SEQ ID NO: 2117465 - DNA, 15 bp, Homo sapiens
ttgacttccaaatgc

SEQ ID NO: 2117466 - DNA, 15 bp, Homo sapiens
tgacttccaaatgca

SEQ ID NO: 2117467 - DNA, 15 bp, Homo sapiens
gacttccaaatgcag

SEQ ID NO: 2117468 - DNA, 15 bp, Homo sapiens
acttccaaatgcagg

SEQ ID NO: 2117469 - DNA, 15 bp, Homo sapiens
cttccaaatgcaggc

SEQ ID NO: 2117470 - DNA, 15 bp, Homo sapiens
ttccaaatgcaggct

SEQ ID NO: 2117471 - DNA, 15 bp, Homo sapiens
tccaaatgcaggctt

SEQ ID NO: 2117472 - DNA, 15 bp, Homo sapiens
ccaaatgcaggcttc

SEQ ID NO: 2117473 - DNA, 15 bp, Homo sapiens
caaatgcaggcttcc

SEQ ID NO: 2117474 - DNA, 15 bp, Homo sapiens
aaatgcaggcttcca

SEQ ID NO: 2117475 - DNA, 15 bp, Homo sapiens
aatgcaggcttccag

SEQ ID NO: 2117476 - DNA, 15 bp, Homo sapiens
atgcaggcttccagt

SEQ ID NO: 2117477 - DNA, 15 bp, Homo sapiens
tgcaggcttccagtt

SEQ ID NO: 2117478 - DNA, 15 bp, Homo sapiens
gcaggcttccagtta

SEQ ID NO: 2117479 - DNA, 15 bp, Homo sapiens
caggcttccagttaa

SEQ ID NO: 2117480 - DNA, 15 bp, Homo sapiens
aggcttccagttaaa

SEQ ID NO: 2117481 - DNA, 15 bp, Homo sapiens
ggcttccagttaaac

SEQ ID NO: 2117482 - DNA, 15 bp, Homo sapiens
gcttccagttaaaca

SEQ ID NO: 2117483 - DNA, 15 bp, Homo sapiens
cttccagttaaacat

SEQ ID NO: 2117484 - DNA, 15 bp, Homo sapiens
ttccagttaaacatg

SEQ ID NO: 2117485 - DNA, 15 bp, Homo sapiens
tccagttaaacatgg

SEQ ID NO: 2117486 - DNA, 15 bp, Homo sapiens
ccagttaaacatggc

SEQ ID NO: 2117487 - DNA, 15 bp, Homo sapiens
cagttaaacatggcg

SEQ ID NO: 2117488 - DNA, 15 bp, Homo sapiens
agttaaacatggcgg

SEQ ID NO: 2117489 - DNA, 15 bp, Homo sapiens
gttaaacatggcggt

SEQ ID NO: 2117490 - DNA, 15 bp, Homo sapiens
ttaaacatggcggtt

SEQ ID NO: 2117491 - DNA, 15 bp, Homo sapiens
taaacatggcggttc

SEQ ID NO: 2117492 - DNA, 15 bp, Homo sapiens
aaacatggcggttca

SEQ ID NO: 2117493 - DNA, 15 bp, Homo sapiens
aacatggcggttcat

SEQ ID NO: 2117494 - DNA, 15 bp, Homo sapiens
acatggcggttcata

SEQ ID NO: 2117495 - DNA, 15 bp, Homo sapiens
catggcggttcatac

SEQ ID NO: 2117496 - DNA, 15 bp, Homo sapiens
atggcggttcataca

SEQ ID NO: 2117497 - DNA, 15 bp, Homo sapiens
tggcggttcatacat

SEQ ID NO: 2117498 - DNA, 15 bp, Homo sapiens
ggcggttcatacatg

SEQ ID NO: 2117499 - DNA, 15 bp, Homo sapiens
gcggttcatacatgt

SEQ ID NO: 2117500 - DNA, 15 bp, Homo sapiens
cggttcatacatgtt

SEQ ID NO: 2117501 - DNA, 15 bp, Homo sapiens
ggttcatacatgttt

SEQ ID NO: 2117502 - DNA, 15 bp, Homo sapiens
gttcatacatgttta

SEQ ID NO: 2117503 - DNA, 15 bp, Homo sapiens
ttcatacatgtttat

SEQ ID NO: 2117504 - DNA, 15 bp, Homo sapiens
tcatacatgtttatg

SEQ ID NO: 2117505 - DNA, 15 bp, Homo sapiens
catacatgtttatgc

SEQ ID NO: 2117506 - DNA, 15 bp, Homo sapiens
atacatgtttatgca

SEQ ID NO: 2117507 - DNA, 15 bp, Homo sapiens
tacatgtttatgcat

SEQ ID NO: 2117508 - DNA, 15 bp, Homo sapiens
acatgtttatgcatt

SEQ ID NO: 2117509 - DNA, 15 bp, Homo sapiens
catgtttatgcattt

SEQ ID NO: 2117510 - DNA, 15 bp, Homo sapiens
atgtttatgcattta

SEQ ID NO: 2117511 - DNA, 15 bp, Homo sapiens
tgtttatgcatttac

SEQ ID NO: 2117512 - DNA, 15 bp, Homo sapiens
gtttatgcatttact

SEQ ID NO: 2117513 - DNA, 15 bp, Homo sapiens
tttatgcatttactc

SEQ ID NO: 2117514 - DNA, 15 bp, Homo sapiens
ttatgcatttactct

SEQ ID NO: 2117515 - DNA, 15 bp, Homo sapiens
tatgcatttactcta

SEQ ID NO: 2117516 - DNA, 15 bp, Homo sapiens
atgcatttactctac

SEQ ID NO: 2117517 - DNA, 15 bp, Homo sapiens
tgcatttactctact

SEQ ID NO: 2117518 - DNA, 15 bp, Homo sapiens
gcatttactctactg

SEQ ID NO: 2117519 - DNA, 15 bp, Homo sapiens
catttactctactgc

SEQ ID NO: 2117520 - DNA, 15 bp, Homo sapiens
atttactctactgct

SEQ ID NO: 2117521 - DNA, 15 bp, Homo sapiens
tttactctactgctt

SEQ ID NO: 2117522 - DNA, 15 bp, Homo sapiens
ttactctactgcttc

SEQ ID NO: 2117523 - DNA, 15 bp, Homo sapiens
tactctactgcttcc

SEQ ID NO: 2117524 - DNA, 15 bp, Homo sapiens
actctactgcttcct

SEQ ID NO: 2117525 - DNA, 15 bp, Homo sapiens
ctctactgcttccta

SEQ ID NO: 2117526 - DNA, 15 bp, Homo sapiens
tctactgcttcctaa

SEQ ID NO: 2117527 - DNA, 15 bp, Homo sapiens
ctactgcttcctaaa

SEQ ID NO: 2117528 - DNA, 15 bp, Homo sapiens
tactgcttcctaaaa

SEQ ID NO: 2117529 - DNA, 15 bp, Homo sapiens
actgcttcctaaaac

SEQ ID NO: 2117530 - DNA, 15 bp, Homo sapiens
ctgcttcctaaaact

SEQ ID NO: 2117531 - DNA, 15 bp, Homo sapiens
tgcttcctaaaactc

SEQ ID NO: 2117532 - DNA, 15 bp, Homo sapiens
gcttcctaaaactcc

SEQ ID NO: 2117533 - DNA, 15 bp, Homo sapiens
cttcctaaaactcca

SEQ ID NO: 2117534 - DNA, 15 bp, Homo sapiens
ttcctaaaactccat

SEQ ID NO: 2117535 - DNA, 15 bp, Homo sapiens
tcctaaaactccatt

SEQ ID NO: 2117536 - DNA, 15 bp, Homo sapiens
cctaaaactccatta

SEQ ID NO: 2117537 - DNA, 15 bp, Homo sapiens
ctaaaactccattaa

SEQ ID NO: 2117538 - DNA, 15 bp, Homo sapiens
taaaactccattaat

SEQ ID NO: 2117539 - DNA, 15 bp, Homo sapiens
aaaactccattaatg

SEQ ID NO: 2117540 - DNA, 15 bp, Homo sapiens
aaactccattaatga

SEQ ID NO: 2117541 - DNA, 15 bp, Homo sapiens
aactccattaatgag

SEQ ID NO: 2117542 - DNA, 15 bp, Homo sapiens
actccattaatgaga

SEQ ID NO: 2117543 - DNA, 15 bp, Homo sapiens
ctccattaatgagag

SEQ ID NO: 2117544 - DNA, 15 bp, Homo sapiens
tccattaatgagagt

SEQ ID NO: 2117545 - DNA, 15 bp, Homo sapiens
ccattaatgagagta

SEQ ID NO: 2117546 - DNA, 15 bp, Homo sapiens
cattaatgagagtaa

SEQ ID NO: 2117547 - DNA, 15 bp, Homo sapiens
attaatgagagtaaa

SEQ ID NO: 2117548 - DNA, 15 bp, Homo sapiens
ttaatgagagtaaat

SEQ ID NO: 2117549 - DNA, 15 bp, Homo sapiens
taatgagagtaaatg

SEQ ID NO: 2117550 - DNA, 15 bp, Homo sapiens
aatgagagtaaatgt

SEQ ID NO: 2117551 - DNA, 15 bp, Homo sapiens
atgagagtaaatgtg

SEQ ID NO: 2117552 - DNA, 15 bp, Homo sapiens
tgagagtaaatgtgc

SEQ ID NO: 2117553 - DNA, 15 bp, Homo sapiens
gagagtaaatgtgca

SEQ ID NO: 2117554 - DNA, 15 bp, Homo sapiens
agagtaaatgtgcac

SEQ ID NO: 2117555 - DNA, 15 bp, Homo sapiens
gagtaaatgtgcact

SEQ ID NO: 2117556 - DNA, 15 bp, Homo sapiens
agtaaatgtgcactc

SEQ ID NO: 2117557 - DNA, 15 bp, Homo sapiens
gtaaatgtgcactcc

SEQ ID NO: 2117558 - DNA, 15 bp, Homo sapiens
taaatgtgcactcca

SEQ ID NO: 2117559 - DNA, 15 bp, Homo sapiens
aaatgtgcactccat

SEQ ID NO: 2117560 - DNA, 15 bp, Homo sapiens
aatgtgcactccata

SEQ ID NO: 2117561 - DNA, 15 bp, Homo sapiens
atgtgcactccatat

SEQ ID NO: 2117562 - DNA, 15 bp, Homo sapiens
tgtgcactccatatg

SEQ ID NO: 2117563 - DNA, 15 bp, Homo sapiens
gtgcactccatatgc

SEQ ID NO: 2117564 - DNA, 15 bp, Homo sapiens
tgcactccatatgca

SEQ ID NO: 2117565 - DNA, 15 bp, Homo sapiens
gcactccatatgcaa

SEQ ID NO: 2117566 - DNA, 15 bp, Homo sapiens
cactccatatgcaag

SEQ ID NO: 2117567 - DNA, 15 bp, Homo sapiens
actccatatgcaagc

SEQ ID NO: 2117568 - DNA, 15 bp, Homo sapiens
ctccatatgcaagca

SEQ ID NO: 2117569 - DNA, 15 bp, Homo sapiens
tccatatgcaagcaa

SEQ ID NO: 2117570 - DNA, 15 bp, Homo sapiens
ccatatgcaagcaaa

SEQ ID NO: 2117571 - DNA, 15 bp, Homo sapiens
catatgcaagcaaat

SEQ ID NO: 2117572 - DNA, 15 bp, Homo sapiens
atatgcaagcaaata

SEQ ID NO: 2117573 - DNA, 15 bp, Homo sapiens
tatgcaagcaaatac

SEQ ID NO: 2117574 - DNA, 15 bp, Homo sapiens
atgcaagcaaataca

SEQ ID NO: 2117575 - DNA, 15 bp, Homo sapiens
tgcaagcaaatacac

SEQ ID NO: 2117576 - DNA, 15 bp, Homo sapiens
gcaagcaaatacacc

SEQ ID NO: 2117577 - DNA, 15 bp, Homo sapiens
caagcaaatacacct

SEQ ID NO: 2117578 - DNA, 15 bp, Homo sapiens
aagcaaatacaccta

SEQ ID NO: 2117579 - DNA, 15 bp, Homo sapiens
agcaaatacacctaa

SEQ ID NO: 2117580 - DNA, 15 bp, Homo sapiens
gcaaatacacctaaa

SEQ ID NO: 2117581 - DNA, 15 bp, Homo sapiens
caaatacacctaaag

SEQ ID NO: 2117582 - DNA, 15 bp, Homo sapiens
aaatacacctaaaga

SEQ ID NO: 2117583 - DNA, 15 bp, Homo sapiens
aatacacctaaagaa

SEQ ID NO: 2117584 - DNA, 15 bp, Homo sapiens
atacacctaaagaaa

SEQ ID NO: 2117585 - DNA, 15 bp, Homo sapiens
tacacctaaagaaat

SEQ ID NO: 2117586 - DNA, 15 bp, Homo sapiens
acacctaaagaaatt

SEQ ID NO: 2117587 - DNA, 15 bp, Homo sapiens
cacctaaagaaattt

SEQ ID NO: 2117588 - DNA, 15 bp, Homo sapiens
acctaaagaaatttt

SEQ ID NO: 2117589 - DNA, 15 bp, Homo sapiens
cctaaagaaatttta

SEQ ID NO: 2117590 - DNA, 15 bp, Homo sapiens
ctaaagaaattttaa

SEQ ID NO: 2117591 - DNA, 15 bp, Homo sapiens
taaagaaattttaaa

SEQ ID NO: 2117592 - DNA, 15 bp, Homo sapiens
aaagaaattttaaat

SEQ ID NO: 2117593 - DNA, 15 bp, Homo sapiens
aagaaattttaaata

SEQ ID NO: 2117594 - DNA, 15 bp, Homo sapiens
agaaattttaaataa

SEQ ID NO: 2117595 - DNA, 15 bp, Homo sapiens
gaaattttaaataaa

SEQ ID NO: 2117596 - DNA, 15 bp, Homo sapiens
aaattttaaataaac

SEQ ID NO: 2117597 - DNA, 15 bp, Homo sapiens
aattttaaataaacg

SEQ ID NO: 2117598 - DNA, 15 bp, Homo sapiens
attttaaataaacgg

SEQ ID NO: 2117599 - DNA, 15 bp, Homo sapiens
ttttaaataaacgga

SEQ ID NO: 2117600 - DNA, 15 bp, Homo sapiens
tttaaataaacggat

SEQ ID NO: 2117601 - DNA, 15 bp, Homo sapiens
ttaaataaacggatc

SEQ ID NO: 2117602 - DNA, 15 bp, Homo sapiens
taaataaacggatcc

SEQ ID NO: 2117603 - DNA, 15 bp, Homo sapiens
aaataaacggatcct

SEQ ID NO: 2117604 - DNA, 15 bp, Homo sapiens
aataaacggatccta

SEQ ID NO: 2117605 - DNA, 15 bp, Homo sapiens
ataaacggatcctag

SEQ ID NO: 2117606 - DNA, 15 bp, Homo sapiens
taaacggatcctagc

SEQ ID NO: 2117607 - DNA, 15 bp, Homo sapiens
aaacggatcctagct

SEQ ID NO: 2117608 - DNA, 15 bp, Homo sapiens
aacggatcctagctc

SEQ ID NO: 2117609 - DNA, 15 bp, Homo sapiens
acggatcctagctca

SEQ ID NO: 2117610 - DNA, 15 bp, Homo sapiens
cggatcctagctcaa

SEQ ID NO: 2117611 - DNA, 15 bp, Homo sapiens
ggatcctagctcaaa

SEQ ID NO: 2117612 - DNA, 15 bp, Homo sapiens
gatcctagctcaaat

SEQ ID NO: 2117613 - DNA, 15 bp, Homo sapiens
atcctagctcaaatt

SEQ ID NO: 2117614 - DNA, 15 bp, Homo sapiens
tcctagctcaaattc

SEQ ID NO: 2117615 - DNA, 15 bp, Homo sapiens
cctagctcaaattca

SEQ ID NO: 2117616 - DNA, 15 bp, Homo sapiens
ctagctcaaattcat

SEQ ID NO: 2117617 - DNA, 15 bp, Homo sapiens
tagctcaaattcatt

SEQ ID NO: 2117618 - DNA, 15 bp, Homo sapiens
agctcaaattcattt

SEQ ID NO: 2117619 - DNA, 15 bp, Homo sapiens
gctcaaattcattta

SEQ ID NO: 2117620 - DNA, 15 bp, Homo sapiens
ctcaaattcatttat

SEQ ID NO: 2117621 - DNA, 15 bp, Homo sapiens
tcaaattcatttata

SEQ ID NO: 2117622 - DNA, 15 bp, Homo sapiens
caaattcatttatac

SEQ ID NO: 2117623 - DNA, 15 bp, Homo sapiens
aaattcatttataca

SEQ ID NO: 2117624 - DNA, 15 bp, Homo sapiens
aattcatttatacac

SEQ ID NO: 2117625 - DNA, 15 bp, Homo sapiens
attcatttatacact

SEQ ID NO: 2117626 - DNA, 15 bp, Homo sapiens
ttcatttatacactg

SEQ ID NO: 2117627 - DNA, 15 bp, Homo sapiens
tcatttatacactgg

SEQ ID NO: 2117628 - DNA, 15 bp, Homo sapiens
catttatacactggc

SEQ ID NO: 2117629 - DNA, 15 bp, Homo sapiens
atttatacactggca

SEQ ID NO: 2117630 - DNA, 15 bp, Homo sapiens
tttatacactggcat

SEQ ID NO: 2117631 - DNA, 15 bp, Homo sapiens
ttatacactggcatc

SEQ ID NO: 2117632 - DNA, 15 bp, Homo sapiens
tatacactggcatct

SEQ ID NO: 2117633 - DNA, 15 bp, Homo sapiens
atacactggcatcta

SEQ ID NO: 2117634 - DNA, 15 bp, Homo sapiens
tacactggcatctaa

SEQ ID NO: 2117635 - DNA, 15 bp, Homo sapiens
acactggcatctaaa

SEQ ID NO: 2117636 - DNA, 15 bp, Homo sapiens
cactggcatctaaaa

SEQ ID NO: 2117637 - DNA, 15 bp, Homo sapiens
actggcatctaaaag

SEQ ID NO: 2117638 - DNA, 15 bp, Homo sapiens
ctggcatctaaaagg

SEQ ID NO: 2117639 - DNA, 15 bp, Homo sapiens
tggcatctaaaaggg

SEQ ID NO: 2117640 - DNA, 15 bp, Homo sapiens
ggcatctaaaaggga

SEQ ID NO: 2117641 - DNA, 15 bp, Homo sapiens
gcatctaaaagggaa

SEQ ID NO: 2117642 - DNA, 15 bp, Homo sapiens
catctaaaagggaac

SEQ ID NO: 2117643 - DNA, 15 bp, Homo sapiens
atctaaaagggaaca

SEQ ID NO: 2117644 - DNA, 15 bp, Homo sapiens
tctaaaagggaacaa

SEQ ID NO: 2117645 - DNA, 15 bp, Homo sapiens
ctaaaagggaacaac

SEQ ID NO: 2117646 - DNA, 15 bp, Homo sapiens
taaaagggaacaact

SEQ ID NO: 2117647 - DNA, 15 bp, Homo sapiens
aaaagggaacaacta

SEQ ID NO: 2117648 - DNA, 15 bp, Homo sapiens
aaagggaacaactat

SEQ ID NO: 2117649 - DNA, 15 bp, Homo sapiens
aagggaacaactatt

SEQ ID NO: 2117650 - DNA, 15 bp, Homo sapiens
agggaacaactattc

SEQ ID NO: 2117651 - DNA, 15 bp, Homo sapiens
gggaacaactattcc

SEQ ID NO: 2117652 - DNA, 15 bp, Homo sapiens
ggaacaactattcca

SEQ ID NO: 2117653 - DNA, 15 bp, Homo sapiens
gaacaactattccag

SEQ ID NO: 2117654 - DNA, 15 bp, Homo sapiens
aacaactattccagt

SEQ ID NO: 2117655 - DNA, 15 bp, Homo sapiens
acaactattccagtc

SEQ ID NO: 2117656 - DNA, 15 bp, Homo sapiens
caactattccagtct

SEQ ID NO: 2117657 - DNA, 15 bp, Homo sapiens
aactattccagtctc

SEQ ID NO: 2117658 - DNA, 15 bp, Homo sapiens
actattccagtctcc

SEQ ID NO: 2117659 - DNA, 15 bp, Homo sapiens
ctattccagtctccc

SEQ ID NO: 2117660 - DNA, 15 bp, Homo sapiens
tattccagtctcccc

SEQ ID NO: 2117661 - DNA, 15 bp, Homo sapiens
attccagtctcccca

SEQ ID NO: 2117662 - DNA, 15 bp, Homo sapiens
ttccagtctccccaa

SEQ ID NO: 2117663 - DNA, 15 bp, Homo sapiens
tccagtctccccaag

SEQ ID NO: 2117664 - DNA, 15 bp, Homo sapiens
ccagtctccccaagt

SEQ ID NO: 2117665 - DNA, 15 bp, Homo sapiens
cagtctccccaagtc

SEQ ID NO: 2117666 - DNA, 15 bp, Homo sapiens
agtctccccaagtct

SEQ ID NO: 2117667 - DNA, 15 bp, Homo sapiens
gtctccccaagtctt

SEQ ID NO: 2117668 - DNA, 15 bp, Homo sapiens
tctccccaagtcttc

SEQ ID NO: 2117669 - DNA, 15 bp, Homo sapiens
ctccccaagtcttct

SEQ ID NO: 2117670 - DNA, 15 bp, Homo sapiens
tccccaagtcttctt

SEQ ID NO: 2117671 - DNA, 15 bp, Homo sapiens
ccccaagtcttctta

SEQ ID NO: 2117672 - DNA, 15 bp, Homo sapiens
cccaagtcttcttaa

SEQ ID NO: 2117673 - DNA, 15 bp, Homo sapiens
ccaagtcttcttaag

SEQ ID NO: 2117674 - DNA, 15 bp, Homo sapiens
caagtcttcttaagc

SEQ ID NO: 2117675 - DNA, 15 bp, Homo sapiens
aagtcttcttaagca

SEQ ID NO: 2117676 - DNA, 15 bp, Homo sapiens
agtcttcttaagcat

SEQ ID NO: 2117677 - DNA, 15 bp, Homo sapiens
gtcttcttaagcata

SEQ ID NO: 2117678 - DNA, 15 bp, Homo sapiens
tcttcttaagcatat

SEQ ID NO: 2117679 - DNA, 15 bp, Homo sapiens
cttcttaagcatatt

SEQ ID NO: 2117680 - DNA, 15 bp, Homo sapiens
ttcttaagcatattt

SEQ ID NO: 2117681 - DNA, 15 bp, Homo sapiens
tcttaagcatattta

SEQ ID NO: 2117682 - DNA, 15 bp, Homo sapiens
cttaagcatatttat

SEQ ID NO: 2117683 - DNA, 15 bp, Homo sapiens
ttaagcatatttatg

SEQ ID NO: 2117684 - DNA, 15 bp, Homo sapiens
taagcatatttatgg

SEQ ID NO: 2117685 - DNA, 15 bp, Homo sapiens
aagcatatttatgga

SEQ ID NO: 2117686 - DNA, 15 bp, Homo sapiens
agcatatttatggag

SEQ ID NO: 2117687 - DNA, 15 bp, Homo sapiens
gcatatttatggagt

SEQ ID NO: 2117688 - DNA, 15 bp, Homo sapiens
catatttatggagta

SEQ ID NO: 2117689 - DNA, 15 bp, Homo sapiens
atatttatggagtat

SEQ ID NO: 2117690 - DNA, 15 bp, Homo sapiens
tatttatggagtatc

SEQ ID NO: 2117691 - DNA, 15 bp, Homo sapiens
atttatggagtatct

SEQ ID NO: 2117692 - DNA, 15 bp, Homo sapiens
tttatggagtatctt

SEQ ID NO: 2117693 - DNA, 15 bp, Homo sapiens
ttatggagtatcttg

SEQ ID NO: 2117694 - DNA, 15 bp, Homo sapiens
tatggagtatcttgc

SEQ ID NO: 2117695 - DNA, 15 bp, Homo sapiens
atggagtatcttgct

SEQ ID NO: 2117696 - DNA, 15 bp, Homo sapiens
tggagtatcttgctt

SEQ ID NO: 2117697 - DNA, 15 bp, Homo sapiens
ggagtatcttgcttt

SEQ ID NO: 2117698 - DNA, 15 bp, Homo sapiens
gagtatcttgcttta

SEQ ID NO: 2117699 - DNA, 15 bp, Homo sapiens
agtatcttgctttag

SEQ ID NO: 2117700 - DNA, 15 bp, Homo sapiens
gtatcttgctttagc

SEQ ID NO: 2117701 - DNA, 15 bp, Homo sapiens
tatcttgctttagca

SEQ ID NO: 2117702 - DNA, 15 bp, Homo sapiens
atcttgctttagcat

SEQ ID NO: 2117703 - DNA, 15 bp, Homo sapiens
tcttgctttagcatc

SEQ ID NO: 2117704 - DNA, 15 bp, Homo sapiens
cttgctttagcatca

SEQ ID NO: 2117705 - DNA, 15 bp, Homo sapiens
ttgctttagcatcaa

SEQ ID NO: 2117706 - DNA, 15 bp, Homo sapiens
tgctttagcatcaaa

SEQ ID NO: 2117707 - DNA, 15 bp, Homo sapiens
gctttagcatcaaag

SEQ ID NO: 2117708 - DNA, 15 bp, Homo sapiens
ctttagcatcaaagc

SEQ ID NO: 2117709 - DNA, 15 bp, Homo sapiens
tttagcatcaaagcc

SEQ ID NO: 2117710 - DNA, 15 bp, Homo sapiens
ttagcatcaaagccc

SEQ ID NO: 2117711 - DNA, 15 bp, Homo sapiens
tagcatcaaagccct

SEQ ID NO: 2117712 - DNA, 15 bp, Homo sapiens
agcatcaaagccctc

SEQ ID NO: 2117713 - DNA, 15 bp, Homo sapiens
gcatcaaagccctct

SEQ ID NO: 2117714 - DNA, 15 bp, Homo sapiens
catcaaagccctcta

SEQ ID NO: 2117715 - DNA, 15 bp, Homo sapiens
atcaaagccctctag

SEQ ID NO: 2117716 - DNA, 15 bp, Homo sapiens
tcaaagccctctagt

SEQ ID NO: 2117717 - DNA, 15 bp, Homo sapiens
caaagccctctagtt

SEQ ID NO: 2117718 - DNA, 15 bp, Homo sapiens
aaagccctctagttt

SEQ ID NO: 2117719 - DNA, 15 bp, Homo sapiens
aagccctctagtttt

SEQ ID NO: 2117720 - DNA, 15 bp, Homo sapiens
agccctctagttttg

SEQ ID NO: 2117721 - DNA, 15 bp, Homo sapiens
gccctctagttttgc

SEQ ID NO: 2117722 - DNA, 15 bp, Homo sapiens
ccctctagttttgcc

SEQ ID NO: 2117723 - DNA, 15 bp, Homo sapiens
cctctagttttgcct

SEQ ID NO: 2117724 - DNA, 15 bp, Homo sapiens
ctctagttttgcctg

SEQ ID NO: 2117725 - DNA, 15 bp, Homo sapiens
tctagttttgcctgt

SEQ ID NO: 2117726 - DNA, 15 bp, Homo sapiens
ctagttttgcctgtt

SEQ ID NO: 2117727 - DNA, 15 bp, Homo sapiens
tagttttgcctgtta

SEQ ID NO: 2117728 - DNA, 15 bp, Homo sapiens
agttttgcctgttac

SEQ ID NO: 2117729 - DNA, 15 bp, Homo sapiens
gttttgcctgttact

SEQ ID NO: 2117730 - DNA, 15 bp, Homo sapiens
ttttgcctgttacta

SEQ ID NO: 2117731 - DNA, 15 bp, Homo sapiens
tttgcctgttactat

SEQ ID NO: 2117732 - DNA, 15 bp, Homo sapiens
ttgcctgttactatg

SEQ ID NO: 2117733 - DNA, 15 bp, Homo sapiens
tgcctgttactatgg

SEQ ID NO: 2117734 - DNA, 15 bp, Homo sapiens
gcctgttactatggt

SEQ ID NO: 2117735 - DNA, 15 bp, Homo sapiens
cctgttactatggtg

SEQ ID NO: 2117736 - DNA, 15 bp, Homo sapiens
ctgttactatggtga

SEQ ID NO: 2117737 - DNA, 15 bp, Homo sapiens
tgttactatggtgat

SEQ ID NO: 2117738 - DNA, 15 bp, Homo sapiens
gttactatggtgatg

SEQ ID NO: 2117739 - DNA, 15 bp, Homo sapiens
ttactatggtgatga

SEQ ID NO: 2117740 - DNA, 15 bp, Homo sapiens
tactatggtgatgac

SEQ ID NO: 2117741 - DNA, 15 bp, Homo sapiens
actatggtgatgaca

SEQ ID NO: 2117742 - DNA, 15 bp, Homo sapiens
ctatggtgatgacat

SEQ ID NO: 2117743 - DNA, 15 bp, Homo sapiens
tatggtgatgacata

SEQ ID NO: 2117744 - DNA, 15 bp, Homo sapiens
atggtgatgacatac

SEQ ID NO: 2117745 - DNA, 15 bp, Homo sapiens
tggtgatgacatact

SEQ ID NO: 2117746 - DNA, 15 bp, Homo sapiens
ggtgatgacatactc

SEQ ID NO: 2117747 - DNA, 15 bp, Homo sapiens
gtgatgacatactca

SEQ ID NO: 2117748 - DNA, 15 bp, Homo sapiens
tgatgacatactcaa

SEQ ID NO: 2117749 - DNA, 15 bp, Homo sapiens
gatgacatactcaaa

SEQ ID NO: 2117750 - DNA, 15 bp, Homo sapiens
atgacatactcaaag

SEQ ID NO: 2117751 - DNA, 15 bp, Homo sapiens
tgacatactcaaaga

SEQ ID NO: 2117752 - DNA, 15 bp, Homo sapiens
gacatactcaaagag

SEQ ID NO: 2117753 - DNA, 15 bp, Homo sapiens
acatactcaaagagc

SEQ ID NO: 2117754 - DNA, 15 bp, Homo sapiens
catactcaaagagca

SEQ ID NO: 2117755 - DNA, 15 bp, Homo sapiens
atactcaaagagcat

SEQ ID NO: 2117756 - DNA, 15 bp, Homo sapiens
tactcaaagagcatt

SEQ ID NO: 2117757 - DNA, 15 bp, Homo sapiens
actcaaagagcattc

SEQ ID NO: 2117758 - DNA, 15 bp, Homo sapiens
ctcaaagagcattcc

SEQ ID NO: 2117759 - DNA, 15 bp, Homo sapiens
tcaaagagcattccc

SEQ ID NO: 2117760 - DNA, 15 bp, Homo sapiens
caaagagcattccct

SEQ ID NO: 2117761 - DNA, 15 bp, Homo sapiens
aaagagcattccctt

SEQ ID NO: 2117762 - DNA, 15 bp, Homo sapiens
aagagcattcccttt

SEQ ID NO: 2117763 - DNA, 15 bp, Homo sapiens
agagcattccctttc

SEQ ID NO: 2117764 - DNA, 15 bp, Homo sapiens
gagcattccctttcc

SEQ ID NO: 2117765 - DNA, 15 bp, Homo sapiens
agcattccctttccc

SEQ ID NO: 2117766 - DNA, 15 bp, Homo sapiens
gcattccctttccct

SEQ ID NO: 2117767 - DNA, 15 bp, Homo sapiens
cattccctttccctt

SEQ ID NO: 2117768 - DNA, 15 bp, Homo sapiens
attccctttccctta

SEQ ID NO: 2117769 - DNA, 15 bp, Homo sapiens
ttccctttcccttaa

SEQ ID NO: 2117770 - DNA, 15 bp, Homo sapiens
tccctttcccttaac

SEQ ID NO: 2117771 - DNA, 15 bp, Homo sapiens
ccctttcccttaacg

SEQ ID NO: 2117772 - DNA, 15 bp, Homo sapiens
cctttcccttaacgg

SEQ ID NO: 2117773 - DNA, 15 bp, Homo sapiens
ctttcccttaacggg

SEQ ID NO: 2117774 - DNA, 15 bp, Homo sapiens
tttcccttaacggga

SEQ ID NO: 2117775 - DNA, 15 bp, Homo sapiens
ttcccttaacgggaa

SEQ ID NO: 2117776 - DNA, 15 bp, Homo sapiens
tcccttaacgggaat

SEQ ID NO: 2117777 - DNA, 15 bp, Homo sapiens
cccttaacgggaatc

SEQ ID NO: 2117778 - DNA, 15 bp, Homo sapiens
ccttaacgggaatct

SEQ ID NO: 2117779 - DNA, 15 bp, Homo sapiens
cttaacgggaatcta

SEQ ID NO: 2117780 - DNA, 15 bp, Homo sapiens
ttaacgggaatctaa

SEQ ID NO: 2117781 - DNA, 15 bp, Homo sapiens
taacgggaatctaag

SEQ ID NO: 2117782 - DNA, 15 bp, Homo sapiens
aacgggaatctaagg

SEQ ID NO: 2117783 - DNA, 15 bp, Homo sapiens
acgggaatctaaggc

SEQ ID NO: 2117784 - DNA, 15 bp, Homo sapiens
cgggaatctaaggct

SEQ ID NO: 2117785 - DNA, 15 bp, Homo sapiens
gggaatctaaggcta

SEQ ID NO: 2117786 - DNA, 15 bp, Homo sapiens
ggaatctaaggctag

SEQ ID NO: 2117787 - DNA, 15 bp, Homo sapiens
gaatctaaggctaga

SEQ ID NO: 2117788 - DNA, 15 bp, Homo sapiens
aatctaaggctagag

SEQ ID NO: 2117789 - DNA, 15 bp, Homo sapiens
atctaaggctagaga

SEQ ID NO: 2117790 - DNA, 15 bp, Homo sapiens
tctaaggctagagaa

SEQ ID NO: 2117791 - DNA, 15 bp, Homo sapiens
ctaaggctagagaaa

SEQ ID NO: 2117792 - DNA, 15 bp, Homo sapiens
taaggctagagaaaa

SEQ ID NO: 2117793 - DNA, 15 bp, Homo sapiens
aaggctagagaaaat

SEQ ID NO: 2117794 - DNA, 15 bp, Homo sapiens
aggctagagaaaatg

SEQ ID NO: 2117795 - DNA, 15 bp, Homo sapiens
ggctagagaaaatgg

SEQ ID NO: 2117796 - DNA, 15 bp, Homo sapiens
gctagagaaaatggt

SEQ ID NO: 2117797 - DNA, 15 bp, Homo sapiens
ctagagaaaatggtt

SEQ ID NO: 2117798 - DNA, 15 bp, Homo sapiens
tagagaaaatggtta

SEQ ID NO: 2117799 - DNA, 15 bp, Homo sapiens
agagaaaatggttac

SEQ ID NO: 2117800 - DNA, 15 bp, Homo sapiens
gagaaaatggttaca

SEQ ID NO: 2117801 - DNA, 15 bp, Homo sapiens
agaaaatggttacat

SEQ ID NO: 2117802 - DNA, 15 bp, Homo sapiens
gaaaatggttacatt

SEQ ID NO: 2117803 - DNA, 15 bp, Homo sapiens
aaaatggttacattt

SEQ ID NO: 2117804 - DNA, 15 bp, Homo sapiens
aaatggttacatttt

SEQ ID NO: 2117805 - DNA, 15 bp, Homo sapiens
aatggttacattttg

SEQ ID NO: 2117806 - DNA, 15 bp, Homo sapiens
atggttacattttgg

SEQ ID NO: 2117807 - DNA, 15 bp, Homo sapiens
tggttacattttgga

SEQ ID NO: 2117808 - DNA, 15 bp, Homo sapiens
ggttacattttggaa

SEQ ID NO: 2117809 - DNA, 15 bp, Homo sapiens
gttacattttggaac

SEQ ID NO: 2117810 - DNA, 15 bp, Homo sapiens
ttacattttggaact

SEQ ID NO: 2117811 - DNA, 15 bp, Homo sapiens
tacattttggaactg

SEQ ID NO: 2117812 - DNA, 15 bp, Homo sapiens
acattttggaactgg

SEQ ID NO: 2117813 - DNA, 15 bp, Homo sapiens
cattttggaactggg

SEQ ID NO: 2117814 - DNA, 15 bp, Homo sapiens
attttggaactggga

SEQ ID NO: 2117815 - DNA, 15 bp, Homo sapiens
ttttggaactgggaa

SEQ ID NO: 2117816 - DNA, 15 bp, Homo sapiens
tttggaactgggaat

SEQ ID NO: 2117817 - DNA, 15 bp, Homo sapiens
ttggaactgggaatc

SEQ ID NO: 2117818 - DNA, 15 bp, Homo sapiens
tggaactgggaatct

SEQ ID NO: 2117819 - DNA, 15 bp, Homo sapiens
ggaactgggaatcta

SEQ ID NO: 2117820 - DNA, 15 bp, Homo sapiens
gaactgggaatctaa

SEQ ID NO: 2117821 - DNA, 15 bp, Homo sapiens
aactgggaatctaag

SEQ ID NO: 2117822 - DNA, 15 bp, Homo sapiens
actgggaatctaagg

SEQ ID NO: 2117823 - DNA, 15 bp, Homo sapiens
ctgggaatctaaggc

SEQ ID NO: 2117824 - DNA, 15 bp, Homo sapiens
tgggaatctaaggct

SEQ ID NO: 2117825 - DNA, 15 bp, Homo sapiens
taaggctagagaaag

SEQ ID NO: 2117826 - DNA, 15 bp, Homo sapiens
aaggctagagaaagt

SEQ ID NO: 2117827 - DNA, 15 bp, Homo sapiens
aggctagagaaagtg

SEQ ID NO: 2117828 - DNA, 15 bp, Homo sapiens
ggctagagaaagtgg

SEQ ID NO: 2117829 - DNA, 15 bp, Homo sapiens
gctagagaaagtggt

SEQ ID NO: 2117830 - DNA, 15 bp, Homo sapiens
ctagagaaagtggtt

SEQ ID NO: 2117831 - DNA, 15 bp, Homo sapiens
agagaaagtggttac

SEQ ID NO: 2117832 - DNA, 15 bp, Homo sapiens
gagaaagtggttaca

SEQ ID NO: 2117833 - DNA, 15 bp, Homo sapiens
agaaagtggttacat

SEQ ID NO: 2117834 - DNA, 15 bp, Homo sapiens
gaaagtggttacatt

SEQ ID NO: 2117835 - DNA, 15 bp, Homo sapiens
agtggttacattttg

SEQ ID NO: 2117836 - DNA, 15 bp, Homo sapiens
gtggttacattttgg

SEQ ID NO: 2117837 - DNA, 15 bp, Homo sapiens
acattttggaactga

SEQ ID NO: 2117838 - DNA, 15 bp, Homo sapiens
cattttggaactgat

SEQ ID NO: 2117839 - DNA, 15 bp, Homo sapiens
attttggaactgata

SEQ ID NO: 2117840 - DNA, 15 bp, Homo sapiens
ttttggaactgatac

SEQ ID NO: 2117841 - DNA, 15 bp, Homo sapiens
tttggaactgataca

SEQ ID NO: 2117842 - DNA, 15 bp, Homo sapiens
ttggaactgatacag

SEQ ID NO: 2117843 - DNA, 15 bp, Homo sapiens
tggaactgatacaga

SEQ ID NO: 2117844 - DNA, 15 bp, Homo sapiens
ggaactgatacagaa

SEQ ID NO: 2117845 - DNA, 15 bp, Homo sapiens
gaactgatacagaac

SEQ ID NO: 2117846 - DNA, 15 bp, Homo sapiens
aactgatacagaacc

SEQ ID NO: 2117847 - DNA, 15 bp, Homo sapiens
actgatacagaacca

SEQ ID NO: 2117848 - DNA, 15 bp, Homo sapiens
ctgatacagaaccat

SEQ ID NO: 2117849 - DNA, 15 bp, Homo sapiens
tgatacagaaccata

SEQ ID NO: 2117850 - DNA, 15 bp, Homo sapiens
gatacagaaccatac

SEQ ID NO: 2117851 - DNA, 15 bp, Homo sapiens
atacagaaccataca

SEQ ID NO: 2117852 - DNA, 15 bp, Homo sapiens
tacagaaccatacat

SEQ ID NO: 2117853 - DNA, 15 bp, Homo sapiens
acagaaccatacatt

SEQ ID NO: 2117854 - DNA, 15 bp, Homo sapiens
cagaaccatacattt

SEQ ID NO: 2117855 - DNA, 15 bp, Homo sapiens
agaaccatacatttc

SEQ ID NO: 2117856 - DNA, 15 bp, Homo sapiens
gaaccatacatttca

SEQ ID NO: 2117857 - DNA, 15 bp, Homo sapiens
aaccatacatttcac

SEQ ID NO: 2117858 - DNA, 15 bp, Homo sapiens
accatacatttcact

SEQ ID NO: 2117859 - DNA, 15 bp, Homo sapiens
ccatacatttcacta

SEQ ID NO: 2117860 - DNA, 15 bp, Homo sapiens
catacatttcactag

SEQ ID NO: 2117861 - DNA, 15 bp, Homo sapiens
atacatttcactagg

SEQ ID NO: 2117862 - DNA, 15 bp, Homo sapiens
tacatttcactaggg

SEQ ID NO: 2117863 - DNA, 15 bp, Homo sapiens
acatttcactagggt

SEQ ID NO: 2117864 - DNA, 15 bp, Homo sapiens
catttcactagggtt

SEQ ID NO: 2117865 - DNA, 15 bp, Homo sapiens
atttcactagggttc

SEQ ID NO: 2117866 - DNA, 15 bp, Homo sapiens
tttcactagggttca

SEQ ID NO: 2117867 - DNA, 15 bp, Homo sapiens
ttcactagggttcaa

SEQ ID NO: 2117868 - DNA, 15 bp, Homo sapiens
tcactagggttcaat

SEQ ID NO: 2117869 - DNA, 15 bp, Homo sapiens
cactagggttcaata

SEQ ID NO: 2117870 - DNA, 15 bp, Homo sapiens
actagggttcaatat

SEQ ID NO: 2117871 - DNA, 15 bp, Homo sapiens
ctagggttcaatatt

SEQ ID NO: 2117872 - DNA, 15 bp, Homo sapiens
tagggttcaatattc

SEQ ID NO: 2117873 - DNA, 15 bp, Homo sapiens
agggttcaatattca

SEQ ID NO: 2117874 - DNA, 15 bp, Homo sapiens
gggttcaatattcac

SEQ ID NO: 2117875 - DNA, 15 bp, Homo sapiens
ggttcaatattcact

SEQ ID NO: 2117876 - DNA, 15 bp, Homo sapiens
gttcaatattcactg

SEQ ID NO: 2117877 - DNA, 15 bp, Homo sapiens
ttcaatattcactga

SEQ ID NO: 2117878 - DNA, 15 bp, Homo sapiens
tcaatattcactgac

SEQ ID NO: 2117879 - DNA, 15 bp, Homo sapiens
caatattcactgaca

SEQ ID NO: 2117880 - DNA, 15 bp, Homo sapiens
aatattcactgacaa

SEQ ID NO: 2117881 - DNA, 15 bp, Homo sapiens
atattcactgacaag

SEQ ID NO: 2117882 - DNA, 15 bp, Homo sapiens
tattcactgacaaga

SEQ ID NO: 2117883 - DNA, 15 bp, Homo sapiens
attcactgacaagaa

SEQ ID NO: 2117884 - DNA, 15 bp, Homo sapiens
ttcactgacaagaat

SEQ ID NO: 2117885 - DNA, 15 bp, Homo sapiens
tcactgacaagaatt

SEQ ID NO: 2117886 - DNA, 15 bp, Homo sapiens
cactgacaagaattt

SEQ ID NO: 2117887 - DNA, 15 bp, Homo sapiens
actgacaagaatttt

SEQ ID NO: 2117888 - DNA, 15 bp, Homo sapiens
ctgacaagaattttg

SEQ ID NO: 2117889 - DNA, 15 bp, Homo sapiens
tgacaagaattttga

SEQ ID NO: 2117890 - DNA, 15 bp, Homo sapiens
gacaagaattttgag

SEQ ID NO: 2117891 - DNA, 15 bp, Homo sapiens
acaagaattttgaga

SEQ ID NO: 2117892 - DNA, 15 bp, Homo sapiens
caagaattttgagaa

SEQ ID NO: 2117893 - DNA, 15 bp, Homo sapiens
aagaattttgagaat

SEQ ID NO: 2117894 - DNA, 15 bp, Homo sapiens
agaattttgagaatc

SEQ ID NO: 2117895 - DNA, 15 bp, Homo sapiens
gaattttgagaatcc

SEQ ID NO: 2117896 - DNA, 15 bp, Homo sapiens
aattttgagaatccg

SEQ ID NO: 2117897 - DNA, 15 bp, Homo sapiens
attttgagaatccgt

SEQ ID NO: 2117898 - DNA, 15 bp, Homo sapiens
ttttgagaatccgtc

SEQ ID NO: 2117899 - DNA, 15 bp, Homo sapiens
tttgagaatccgtca

SEQ ID NO: 2117900 - DNA, 15 bp, Homo sapiens
ttgagaatccgtcat

SEQ ID NO: 2117901 - DNA, 15 bp, Homo sapiens
tgagaatccgtcatc

SEQ ID NO: 2117902 - DNA, 15 bp, Homo sapiens
gagaatccgtcatct

SEQ ID NO: 2117903 - DNA, 15 bp, Homo sapiens
agaatccgtcatctt

SEQ ID NO: 2117904 - DNA, 15 bp, Homo sapiens
gaatccgtcatcttg

SEQ ID NO: 2117905 - DNA, 15 bp, Homo sapiens
aatccgtcatcttgc

SEQ ID NO: 2117906 - DNA, 15 bp, Homo sapiens
atccgtcatcttgca

SEQ ID NO: 2117907 - DNA, 15 bp, Homo sapiens
tccgtcatcttgcag

SEQ ID NO: 2117908 - DNA, 15 bp, Homo sapiens
ccgtcatcttgcaga

SEQ ID NO: 2117909 - DNA, 15 bp, Homo sapiens
cgtcatcttgcagac

SEQ ID NO: 2117910 - DNA, 15 bp, Homo sapiens
gtcatcttgcagacc

SEQ ID NO: 2117911 - DNA, 15 bp, Homo sapiens
tcatcttgcagacca

SEQ ID NO: 2117912 - DNA, 15 bp, Homo sapiens
catcttgcagaccaa

SEQ ID NO: 2117913 - DNA, 15 bp, Homo sapiens
atcttgcagaccaac

SEQ ID NO: 2117914 - DNA, 15 bp, Homo sapiens
tcttgcagaccaaca

SEQ ID NO: 2117915 - DNA, 15 bp, Homo sapiens
cttgcagaccaacaa

SEQ ID NO: 2117916 - DNA, 15 bp, Homo sapiens
ttgcagaccaacaaa

SEQ ID NO: 2117917 - DNA, 15 bp, Homo sapiens
tgcagaccaacaaaa

SEQ ID NO: 2117918 - DNA, 15 bp, Homo sapiens
gcagaccaacaaaat

SEQ ID NO: 2117919 - DNA, 15 bp, Homo sapiens
cagaccaacaaaata

SEQ ID NO: 2117920 - DNA, 15 bp, Homo sapiens
agaccaacaaaatat

SEQ ID NO: 2117921 - DNA, 15 bp, Homo sapiens
gaccaacaaaatatc

SEQ ID NO: 2117922 - DNA, 15 bp, Homo sapiens
accaacaaaatatca

SEQ ID NO: 2117923 - DNA, 15 bp, Homo sapiens
ccaacaaaatatcaa

SEQ ID NO: 2117924 - DNA, 15 bp, Homo sapiens
caacaaaatatcaaa

SEQ ID NO: 2117925 - DNA, 15 bp, Homo sapiens
aacaaaatatcaaag

SEQ ID NO: 2117926 - DNA, 15 bp, Homo sapiens
acaaaatatcaaagt

SEQ ID NO: 2117927 - DNA, 15 bp, Homo sapiens
caaaatatcaaagtc

SEQ ID NO: 2117928 - DNA, 15 bp, Homo sapiens
aaaatatcaaagtct

SEQ ID NO: 2117929 - DNA, 15 bp, Homo sapiens
aaatatcaaagtctt

SEQ ID NO: 2117930 - DNA, 15 bp, Homo sapiens
aatatcaaagtctta

SEQ ID NO: 2117931 - DNA, 15 bp, Homo sapiens
atatcaaagtcttat

SEQ ID NO: 2117932 - DNA, 15 bp, Homo sapiens
tatcaaagtcttatg

SEQ ID NO: 2117933 - DNA, 15 bp, Homo sapiens
atcaaagtcttatgg

SEQ ID NO: 2117934 - DNA, 15 bp, Homo sapiens
tcaaagtcttatgga

SEQ ID NO: 2117935 - DNA, 15 bp, Homo sapiens
caaagtcttatggag

SEQ ID NO: 2117936 - DNA, 15 bp, Homo sapiens
aaagtcttatggaga

SEQ ID NO: 2117937 - DNA, 15 bp, Homo sapiens
aagtcttatggagag

SEQ ID NO: 2117938 - DNA, 15 bp, Homo sapiens
agtcttatggagaga

SEQ ID NO: 2117939 - DNA, 15 bp, Homo sapiens
gtcttatggagagaa

SEQ ID NO: 2117940 - DNA, 15 bp, Homo sapiens
tcttatggagagaat

SEQ ID NO: 2117941 - DNA, 15 bp, Homo sapiens
cttatggagagaata

SEQ ID NO: 2117942 - DNA, 15 bp, Homo sapiens
ttatggagagaataa

SEQ ID NO: 2117943 - DNA, 15 bp, Homo sapiens
tatggagagaataac

SEQ ID NO: 2117944 - DNA, 15 bp, Homo sapiens
atggagagaataact

SEQ ID NO: 2117945 - DNA, 15 bp, Homo sapiens
tggagagaataactg

SEQ ID NO: 2117946 - DNA, 15 bp, Homo sapiens
ggagagaataactga

SEQ ID NO: 2117947 - DNA, 15 bp, Homo sapiens
gagagaataactgag

SEQ ID NO: 2117948 - DNA, 15 bp, Homo sapiens
agagaataactgagt

SEQ ID NO: 2117949 - DNA, 15 bp, Homo sapiens
gagaataactgagtg

SEQ ID NO: 2117950 - DNA, 15 bp, Homo sapiens
agaataactgagtgg

SEQ ID NO: 2117951 - DNA, 15 bp, Homo sapiens
gaataactgagtggc

SEQ ID NO: 2117952 - DNA, 15 bp, Homo sapiens
aataactgagtggca

SEQ ID NO: 2117953 - DNA, 15 bp, Homo sapiens
ataactgagtggcac

SEQ ID NO: 2117954 - DNA, 15 bp, Homo sapiens
taactgagtggcaca

SEQ ID NO: 2117955 - DNA, 15 bp, Homo sapiens
aactgagtggcacag

SEQ ID NO: 2117956 - DNA, 15 bp, Homo sapiens
actgagtggcacagc

SEQ ID NO: 2117957 - DNA, 15 bp, Homo sapiens
ctgagtggcacagcc

SEQ ID NO: 2117958 - DNA, 15 bp, Homo sapiens
tgagtggcacagcca

SEQ ID NO: 2117959 - DNA, 15 bp, Homo sapiens
gagtggcacagccag

SEQ ID NO: 2117960 - DNA, 15 bp, Homo sapiens
agtggcacagccagc

SEQ ID NO: 2117961 - DNA, 15 bp, Homo sapiens
gtggcacagccagcc

SEQ ID NO: 2117962 - DNA, 15 bp, Homo sapiens
tggcacagccagcca

SEQ ID NO: 2117963 - DNA, 15 bp, Homo sapiens
ggcacagccagccat

SEQ ID NO: 2117964 - DNA, 15 bp, Homo sapiens
gcacagccagccatc

SEQ ID NO: 2117965 - DNA, 15 bp, Homo sapiens
cacagccagccatct

SEQ ID NO: 2117966 - DNA, 15 bp, Homo sapiens
acagccagccatctg

SEQ ID NO: 2117967 - DNA, 15 bp, Homo sapiens
cagccagccatctgg

SEQ ID NO: 2117968 - DNA, 15 bp, Homo sapiens
agccagccatctggt

SEQ ID NO: 2117969 - DNA, 15 bp, Homo sapiens
gccagccatctggtt

SEQ ID NO: 2117970 - DNA, 15 bp, Homo sapiens
ccagccatctggttc

SEQ ID NO: 2117971 - DNA, 15 bp, Homo sapiens
cagccatctggttca

SEQ ID NO: 2117972 - DNA, 15 bp, Homo sapiens
agccatctggttcaa

SEQ ID NO: 2117973 - DNA, 15 bp, Homo sapiens
gccatctggttcaaa

SEQ ID NO: 2117974 - DNA, 15 bp, Homo sapiens
ccatctggttcaaat

SEQ ID NO: 2117975 - DNA, 15 bp, Homo sapiens
catctggttcaaata

SEQ ID NO: 2117976 - DNA, 15 bp, Homo sapiens
atctggttcaaatac

SEQ ID NO: 2117977 - DNA, 15 bp, Homo sapiens
tctggttcaaatact

SEQ ID NO: 2117978 - DNA, 15 bp, Homo sapiens
ctggttcaaatactc

SEQ ID NO: 2117979 - DNA, 15 bp, Homo sapiens
tggttcaaatactcc

SEQ ID NO: 2117980 - DNA, 15 bp, Homo sapiens
ggttcaaatactcca

SEQ ID NO: 2117981 - DNA, 15 bp, Homo sapiens
gttcaaatactccag

SEQ ID NO: 2117982 - DNA, 15 bp, Homo sapiens
ttcaaatactccagc

SEQ ID NO: 2117983 - DNA, 15 bp, Homo sapiens
tcaaatactccagca

SEQ ID NO: 2117984 - DNA, 15 bp, Homo sapiens
caaatactccagcat

SEQ ID NO: 2117985 - DNA, 15 bp, Homo sapiens
aaatactccagcatc

SEQ ID NO: 2117986 - DNA, 15 bp, Homo sapiens
aatactccagcatca

SEQ ID NO: 2117987 - DNA, 15 bp, Homo sapiens
atactccagcatcag

SEQ ID NO: 2117988 - DNA, 15 bp, Homo sapiens
tactccagcatcaga

SEQ ID NO: 2117989 - DNA, 15 bp, Homo sapiens
actccagcatcagac

SEQ ID NO: 2117990 - DNA, 15 bp, Homo sapiens
ctccagcatcagaca

SEQ ID NO: 2117991 - DNA, 15 bp, Homo sapiens
tccagcatcagacag

SEQ ID NO: 2117992 - DNA, 15 bp, Homo sapiens
ccagcatcagacaga

SEQ ID NO: 2117993 - DNA, 15 bp, Homo sapiens
cagcatcagacagaa

SEQ ID NO: 2117994 - DNA, 15 bp, Homo sapiens
agcatcagacagaat

SEQ ID NO: 2117995 - DNA, 15 bp, Homo sapiens
gcatcagacagaatt

SEQ ID NO: 2117996 - DNA, 15 bp, Homo sapiens
catcagacagaattg

SEQ ID NO: 2117997 - DNA, 15 bp, Homo sapiens
atcagacagaattgt

SEQ ID NO: 2117998 - DNA, 15 bp, Homo sapiens
tcagacagaattgtc

SEQ ID NO: 2117999 - DNA, 15 bp, Homo sapiens
cagacagaattgtca

SEQ ID NO: 2118000 - DNA, 15 bp, Homo sapiens
agacagaattgtcac

SEQ ID NO: 2118001 - DNA, 15 bp, Homo sapiens
gacagaattgtcaca

SEQ ID NO: 2118002 - DNA, 15 bp, Homo sapiens
acagaattgtcacag

SEQ ID NO: 2118003 - DNA, 15 bp, Homo sapiens
cagaattgtcacagc

SEQ ID NO: 2118004 - DNA, 15 bp, Homo sapiens
agaattgtcacagct

SEQ ID NO: 2118005 - DNA, 15 bp, Homo sapiens
gaattgtcacagcta

SEQ ID NO: 2118006 - DNA, 15 bp, Homo sapiens
aattgtcacagctag

SEQ ID NO: 2118007 - DNA, 15 bp, Homo sapiens
attgtcacagctaga

SEQ ID NO: 2118008 - DNA, 15 bp, Homo sapiens
ttgtcacagctagac

SEQ ID NO: 2118009 - DNA, 15 bp, Homo sapiens
tgtcacagctagacg

SEQ ID NO: 2118010 - DNA, 15 bp, Homo sapiens
gtcacagctagacgt

SEQ ID NO: 2118011 - DNA, 15 bp, Homo sapiens
tcacagctagacgtg

SEQ ID NO: 2118012 - DNA, 15 bp, Homo sapiens
cacagctagacgtga

SEQ ID NO: 2118013 - DNA, 15 bp, Homo sapiens
acagctagacgtgat

SEQ ID NO: 2118014 - DNA, 15 bp, Homo sapiens
cagctagacgtgata

SEQ ID NO: 2118015 - DNA, 15 bp, Homo sapiens
agctagacgtgatat

SEQ ID NO: 2118016 - DNA, 15 bp, Homo sapiens
gctagacgtgatatt

SEQ ID NO: 2118017 - DNA, 15 bp, Homo sapiens
ctagacgtgatatta

SEQ ID NO: 2118018 - DNA, 15 bp, Homo sapiens
tagacgtgatattaa

SEQ ID NO: 2118019 - DNA, 15 bp, Homo sapiens
agacgtgatattaat

SEQ ID NO: 2118020 - DNA, 15 bp, Homo sapiens
gacgtgatattaata

SEQ ID NO: 2118021 - DNA, 15 bp, Homo sapiens
acgtgatattaataa

SEQ ID NO: 2118022 - DNA, 15 bp, Homo sapiens
cgtgatattaataat

SEQ ID NO: 2118023 - DNA, 15 bp, Homo sapiens
gtgatattaataatc

SEQ ID NO: 2118024 - DNA, 15 bp, Homo sapiens
tgatattaataatca

SEQ ID NO: 2118025 - DNA, 15 bp, Homo sapiens
gatattaataatcac

SEQ ID NO: 2118026 - DNA, 15 bp, Homo sapiens
atattaataatcaca

SEQ ID NO: 2118027 - DNA, 15 bp, Homo sapiens
tattaataatcacat

SEQ ID NO: 2118028 - DNA, 15 bp, Homo sapiens
attaataatcacata

SEQ ID NO: 2118029 - DNA, 15 bp, Homo sapiens
ttaataatcacatag

SEQ ID NO: 2118030 - DNA, 15 bp, Homo sapiens
taataatcacatagg

SEQ ID NO: 2118031 - DNA, 15 bp, Homo sapiens
aataatcacataggc

SEQ ID NO: 2118032 - DNA, 15 bp, Homo sapiens
ataatcacataggcc

SEQ ID NO: 2118033 - DNA, 15 bp, Homo sapiens
taatcacataggcca

SEQ ID NO: 2118034 - DNA, 15 bp, Homo sapiens
aatcacataggccag

SEQ ID NO: 2118035 - DNA, 15 bp, Homo sapiens
atcacataggccagg

SEQ ID NO: 2118036 - DNA, 15 bp, Homo sapiens
tcacataggccaggc

SEQ ID NO: 2118037 - DNA, 15 bp, Homo sapiens
cacataggccaggcg

SEQ ID NO: 2118038 - DNA, 15 bp, Homo sapiens
acataggccaggcgc

SEQ ID NO: 2118039 - DNA, 15 bp, Homo sapiens
cataggccaggcgca

SEQ ID NO: 2118040 - DNA, 15 bp, Homo sapiens
ataggccaggcgcag

SEQ ID NO: 2118041 - DNA, 15 bp, Homo sapiens
taggccaggcgcagt

SEQ ID NO: 2118042 - DNA, 15 bp, Homo sapiens
aggccaggcgcagtg

SEQ ID NO: 2118043 - DNA, 15 bp, Homo sapiens
ggccaggcgcagtgg

SEQ ID NO: 2118044 - DNA, 15 bp, Homo sapiens
gccaggcgcagtggc

SEQ ID NO: 2118045 - DNA, 15 bp, Homo sapiens
ccaggcgcagtggct

SEQ ID NO: 2118046 - DNA, 15 bp, Homo sapiens
caggcgcagtggctc

SEQ ID NO: 2118047 - DNA, 15 bp, Homo sapiens
aggcgcagtggctca

SEQ ID NO: 2118048 - DNA, 15 bp, Homo sapiens
ggcgcagtggctcat

SEQ ID NO: 2118049 - DNA, 15 bp, Homo sapiens
gcgcagtggctcatg

SEQ ID NO: 2118050 - DNA, 15 bp, Homo sapiens
cgcagtggctcatgc

SEQ ID NO: 2118051 - DNA, 15 bp, Homo sapiens
cctagcactttggga

SEQ ID NO: 2118052 - DNA, 15 bp, Homo sapiens
ctagcactttgggag

SEQ ID NO: 2118053 - DNA, 15 bp, Homo sapiens
tagcactttgggagg

SEQ ID NO: 2118054 - DNA, 15 bp, Homo sapiens
gggaggccaaggcga

SEQ ID NO: 2118055 - DNA, 15 bp, Homo sapiens
ggaggccaaggcgag

SEQ ID NO: 2118056 - DNA, 15 bp, Homo sapiens
gaggccaaggcgagt

SEQ ID NO: 2118057 - DNA, 15 bp, Homo sapiens
aggccaaggcgagtg

SEQ ID NO: 2118058 - DNA, 15 bp, Homo sapiens
ggccaaggcgagtgg

SEQ ID NO: 2118059 - DNA, 15 bp, Homo sapiens
gccaaggcgagtgga

SEQ ID NO: 2118060 - DNA, 15 bp, Homo sapiens
ccaaggcgagtggat

SEQ ID NO: 2118061 - DNA, 15 bp, Homo sapiens
caaggcgagtggatc

SEQ ID NO: 2118062 - DNA, 15 bp, Homo sapiens
aaggcgagtggatca

SEQ ID NO: 2118063 - DNA, 15 bp, Homo sapiens
aggcgagtggatcac

SEQ ID NO: 2118064 - DNA, 15 bp, Homo sapiens
ggcgagtggatcacc

SEQ ID NO: 2118065 - DNA, 15 bp, Homo sapiens
gcgagtggatcacct

SEQ ID NO: 2118066 - DNA, 15 bp, Homo sapiens
cgagtggatcacctg

SEQ ID NO: 2118067 - DNA, 15 bp, Homo sapiens
gagtggatcacctga

SEQ ID NO: 2118068 - DNA, 15 bp, Homo sapiens
agtggatcacctgag

SEQ ID NO: 2118069 - DNA, 15 bp, Homo sapiens
tcacctgaggtcaga

SEQ ID NO: 2118070 - DNA, 15 bp, Homo sapiens
cacctgaggtcagaa

SEQ ID NO: 2118071 - DNA, 15 bp, Homo sapiens
acctgaggtcagaag

SEQ ID NO: 2118072 - DNA, 15 bp, Homo sapiens
cctgaggtcagaagt

SEQ ID NO: 2118073 - DNA, 15 bp, Homo sapiens
ctgaggtcagaagtt

SEQ ID NO: 2118074 - DNA, 15 bp, Homo sapiens
tgaggtcagaagttc

SEQ ID NO: 2118075 - DNA, 15 bp, Homo sapiens
gaggtcagaagttcg

SEQ ID NO: 2118076 - DNA, 15 bp, Homo sapiens
aggtcagaagttcga

SEQ ID NO: 2118077 - DNA, 15 bp, Homo sapiens
ggtcagaagttcgag

SEQ ID NO: 2118078 - DNA, 15 bp, Homo sapiens
gtcagaagttcgaga

SEQ ID NO: 2118079 - DNA, 15 bp, Homo sapiens
tcagaagttcgagac

SEQ ID NO: 2118080 - DNA, 15 bp, Homo sapiens
cagaagttcgagacc

SEQ ID NO: 2118081 - DNA, 15 bp, Homo sapiens
agaagttcgagacca

SEQ ID NO: 2118082 - DNA, 15 bp, Homo sapiens
gaagttcgagaccag

SEQ ID NO: 2118083 - DNA, 15 bp, Homo sapiens
cctggccaacacggc

SEQ ID NO: 2118084 - DNA, 15 bp, Homo sapiens
ctggccaacacggca

SEQ ID NO: 2118085 - DNA, 15 bp, Homo sapiens
tggccaacacggcaa

SEQ ID NO: 2118086 - DNA, 15 bp, Homo sapiens
ggccaacacggcaaa

SEQ ID NO: 2118087 - DNA, 15 bp, Homo sapiens
gccaacacggcaaaa

SEQ ID NO: 2118088 - DNA, 15 bp, Homo sapiens
ccaacacggcaaaac

SEQ ID NO: 2118089 - DNA, 15 bp, Homo sapiens
caacacggcaaaact

SEQ ID NO: 2118090 - DNA, 15 bp, Homo sapiens
aacacggcaaaactc

SEQ ID NO: 2118091 - DNA, 15 bp, Homo sapiens
acacggcaaaactcc

SEQ ID NO: 2118092 - DNA, 15 bp, Homo sapiens
cacggcaaaactcca

SEQ ID NO: 2118093 - DNA, 15 bp, Homo sapiens
acggcaaaactccat

SEQ ID NO: 2118094 - DNA, 15 bp, Homo sapiens
cggcaaaactccatc

SEQ ID NO: 2118095 - DNA, 15 bp, Homo sapiens
ggcaaaactccatct

SEQ ID NO: 2118096 - DNA, 15 bp, Homo sapiens
gcaaaactccatctg

SEQ ID NO: 2118097 - DNA, 15 bp, Homo sapiens
caaaactccatctgt

SEQ ID NO: 2118098 - DNA, 15 bp, Homo sapiens
aaaactccatctgta

SEQ ID NO: 2118099 - DNA, 15 bp, Homo sapiens
aaactccatctgtac

SEQ ID NO: 2118100 - DNA, 15 bp, Homo sapiens
aactccatctgtact

SEQ ID NO: 2118101 - DNA, 15 bp, Homo sapiens
actccatctgtacta

SEQ ID NO: 2118102 - DNA, 15 bp, Homo sapiens
ctccatctgtactaa

SEQ ID NO: 2118103 - DNA, 15 bp, Homo sapiens
tccatctgtactaaa

SEQ ID NO: 2118104 - DNA, 15 bp, Homo sapiens
aaacattagctgggg

SEQ ID NO: 2118105 - DNA, 15 bp, Homo sapiens
aacattagctggggg

SEQ ID NO: 2118106 - DNA, 15 bp, Homo sapiens
acattagctgggggc

SEQ ID NO: 2118107 - DNA, 15 bp, Homo sapiens
cattagctgggggcg

SEQ ID NO: 2118108 - DNA, 15 bp, Homo sapiens
attagctgggggcgg

SEQ ID NO: 2118109 - DNA, 15 bp, Homo sapiens
ttagctgggggcggg

SEQ ID NO: 2118110 - DNA, 15 bp, Homo sapiens
tagctgggggcgggg

SEQ ID NO: 2118111 - DNA, 15 bp, Homo sapiens
agctgggggcggggg

SEQ ID NO: 2118112 - DNA, 15 bp, Homo sapiens
gctgggggcgggggg

SEQ ID NO: 2118113 - DNA, 15 bp, Homo sapiens
ctgggggcggggggt

SEQ ID NO: 2118114 - DNA, 15 bp, Homo sapiens
tgggggcggggggtg

SEQ ID NO: 2118115 - DNA, 15 bp, Homo sapiens
gggggcggggggtgg

SEQ ID NO: 2118116 - DNA, 15 bp, Homo sapiens
ggggcggggggtggg

SEQ ID NO: 2118117 - DNA, 15 bp, Homo sapiens
gggcggggggtgggg

SEQ ID NO: 2118118 - DNA, 15 bp, Homo sapiens
ggcggggggtggggg

SEQ ID NO: 2118119 - DNA, 15 bp, Homo sapiens
gcggggggtgggggg

SEQ ID NO: 2118120 - DNA, 15 bp, Homo sapiens
cggggggtggggggc

SEQ ID NO: 2118121 - DNA, 15 bp, Homo sapiens
ggggggtggggggcg

SEQ ID NO: 2118122 - DNA, 15 bp, Homo sapiens
gggggtggggggcgg

SEQ ID NO: 2118123 - DNA, 15 bp, Homo sapiens
ggggtggggggcggg

SEQ ID NO: 2118124 - DNA, 15 bp, Homo sapiens
gggtggggggcgggt

SEQ ID NO: 2118125 - DNA, 15 bp, Homo sapiens
ggtggggggcgggtg

SEQ ID NO: 2118126 - DNA, 15 bp, Homo sapiens
gtggggggcgggtgc

SEQ ID NO: 2118127 - DNA, 15 bp, Homo sapiens
tggggggcgggtgcc

SEQ ID NO: 2118128 - DNA, 15 bp, Homo sapiens
ggggggcgggtgcct

SEQ ID NO: 2118129 - DNA, 15 bp, Homo sapiens
gggggcgggtgcctg

SEQ ID NO: 2118130 - DNA, 15 bp, Homo sapiens
ggggcgggtgcctgt

SEQ ID NO: 2118131 - DNA, 15 bp, Homo sapiens
gggcgggtgcctgta

SEQ ID NO: 2118132 - DNA, 15 bp, Homo sapiens
cgggtgcctgtaatc

SEQ ID NO: 2118133 - DNA, 15 bp, Homo sapiens
ggagaattgcttgat

SEQ ID NO: 2118134 - DNA, 15 bp, Homo sapiens
gagaattgcttgatc

SEQ ID NO: 2118135 - DNA, 15 bp, Homo sapiens
agaattgcttgatca

SEQ ID NO: 2118136 - DNA, 15 bp, Homo sapiens
gaattgcttgatcat

SEQ ID NO: 2118137 - DNA, 15 bp, Homo sapiens
aattgcttgatcatg

SEQ ID NO: 2118138 - DNA, 15 bp, Homo sapiens
attgcttgatcatgg

SEQ ID NO: 2118139 - DNA, 15 bp, Homo sapiens
ttgcttgatcatggg

SEQ ID NO: 2118140 - DNA, 15 bp, Homo sapiens
tgcttgatcatgggg

SEQ ID NO: 2118141 - DNA, 15 bp, Homo sapiens
gcttgatcatggggg

SEQ ID NO: 2118142 - DNA, 15 bp, Homo sapiens
cttgatcatggggga

SEQ ID NO: 2118143 - DNA, 15 bp, Homo sapiens
ttgatcatgggggaa

SEQ ID NO: 2118144 - DNA, 15 bp, Homo sapiens
tgatcatgggggaag

SEQ ID NO: 2118145 - DNA, 15 bp, Homo sapiens
gatcatgggggaagg

SEQ ID NO: 2118146 - DNA, 15 bp, Homo sapiens
atcatgggggaagga

SEQ ID NO: 2118147 - DNA, 15 bp, Homo sapiens
tcatgggggaaggag

SEQ ID NO: 2118148 - DNA, 15 bp, Homo sapiens
catgggggaaggagg

SEQ ID NO: 2118149 - DNA, 15 bp, Homo sapiens
atgggggaaggaggt

SEQ ID NO: 2118150 - DNA, 15 bp, Homo sapiens
tgggggaaggaggtt

SEQ ID NO: 2118151 - DNA, 15 bp, Homo sapiens
gggggaaggaggttg

SEQ ID NO: 2118152 - DNA, 15 bp, Homo sapiens
ggggaaggaggttgc

SEQ ID NO: 2118153 - DNA, 15 bp, Homo sapiens
gggaaggaggttgca

SEQ ID NO: 2118154 - DNA, 15 bp, Homo sapiens
ggaaggaggttgcag

SEQ ID NO: 2118155 - DNA, 15 bp, Homo sapiens
gaaggaggttgcagt

SEQ ID NO: 2118156 - DNA, 15 bp, Homo sapiens
aaggaggttgcagtg

SEQ ID NO: 2118157 - DNA, 15 bp, Homo sapiens
ggttgcagtgagtcg

SEQ ID NO: 2118158 - DNA, 15 bp, Homo sapiens
gttgcagtgagtcga

SEQ ID NO: 2118159 - DNA, 15 bp, Homo sapiens
ttgcagtgagtcgag

SEQ ID NO: 2118160 - DNA, 15 bp, Homo sapiens
tgcagtgagtcgaga

SEQ ID NO: 2118161 - DNA, 15 bp, Homo sapiens
gcagtgagtcgagat

SEQ ID NO: 2118162 - DNA, 15 bp, Homo sapiens
cagtgagtcgagatc

SEQ ID NO: 2118163 - DNA, 15 bp, Homo sapiens
agtgagtcgagatcg

SEQ ID NO: 2118164 - DNA, 15 bp, Homo sapiens
gtgagtcgagatcgt

SEQ ID NO: 2118165 - DNA, 15 bp, Homo sapiens
tgagtcgagatcgtg

SEQ ID NO: 2118166 - DNA, 15 bp, Homo sapiens
gagtcgagatcgtgc

SEQ ID NO: 2118167 - DNA, 15 bp, Homo sapiens
agtcgagatcgtgct

SEQ ID NO: 2118168 - DNA, 15 bp, Homo sapiens
gtcgagatcgtgcta

SEQ ID NO: 2118169 - DNA, 15 bp, Homo sapiens
tcgagatcgtgctac

SEQ ID NO: 2118170 - DNA, 15 bp, Homo sapiens
cgagatcgtgctact

SEQ ID NO: 2118171 - DNA, 15 bp, Homo sapiens
gagatcgtgctactt

SEQ ID NO: 2118172 - DNA, 15 bp, Homo sapiens
agatcgtgctacttc

SEQ ID NO: 2118173 - DNA, 15 bp, Homo sapiens
gatcgtgctacttca

SEQ ID NO: 2118174 - DNA, 15 bp, Homo sapiens
atcgtgctacttcac

SEQ ID NO: 2118175 - DNA, 15 bp, Homo sapiens
tcgtgctacttcact

SEQ ID NO: 2118176 - DNA, 15 bp, Homo sapiens
cgtgctacttcactc

SEQ ID NO: 2118177 - DNA, 15 bp, Homo sapiens
gtgctacttcactcc

SEQ ID NO: 2118178 - DNA, 15 bp, Homo sapiens
tgctacttcactcca

SEQ ID NO: 2118179 - DNA, 15 bp, Homo sapiens
gctacttcactccag

SEQ ID NO: 2118180 - DNA, 15 bp, Homo sapiens
ctacttcactccagc

SEQ ID NO: 2118181 - DNA, 15 bp, Homo sapiens
tacttcactccagcc

SEQ ID NO: 2118182 - DNA, 15 bp, Homo sapiens
acttcactccagcct

SEQ ID NO: 2118183 - DNA, 15 bp, Homo sapiens
cttcactccagcctg

SEQ ID NO: 2118184 - DNA, 15 bp, Homo sapiens
ttcactccagcctgg

SEQ ID NO: 2118185 - DNA, 15 bp, Homo sapiens
tcactccagcctggg

SEQ ID NO: 2118186 - DNA, 15 bp, Homo sapiens
tccagcctgggcgaa

SEQ ID NO: 2118187 - DNA, 15 bp, Homo sapiens
ccagcctgggcgaaa

SEQ ID NO: 2118188 - DNA, 15 bp, Homo sapiens
cagcctgggcgaaag

SEQ ID NO: 2118189 - DNA, 15 bp, Homo sapiens
agcctgggcgaaaga

SEQ ID NO: 2118190 - DNA, 15 bp, Homo sapiens
gcctgggcgaaagag

SEQ ID NO: 2118191 - DNA, 15 bp, Homo sapiens
cctgggcgaaagagc

SEQ ID NO: 2118192 - DNA, 15 bp, Homo sapiens
ctgggcgaaagagca

SEQ ID NO: 2118193 - DNA, 15 bp, Homo sapiens
tgggcgaaagagcaa

SEQ ID NO: 2118194 - DNA, 15 bp, Homo sapiens
gggcgaaagagcaaa

SEQ ID NO: 2118195 - DNA, 15 bp, Homo sapiens
ggcgaaagagcaaaa

SEQ ID NO: 2118196 - DNA, 15 bp, Homo sapiens
gcgaaagagcaaaac

SEQ ID NO: 2118197 - DNA, 15 bp, Homo sapiens
cgaaagagcaaaact

SEQ ID NO: 2118198 - DNA, 15 bp, Homo sapiens
gaaagagcaaaactc

SEQ ID NO: 2118199 - DNA, 15 bp, Homo sapiens
aaagagcaaaactcc

SEQ ID NO: 2118200 - DNA, 15 bp, Homo sapiens
aagagcaaaactccg

SEQ ID NO: 2118201 - DNA, 15 bp, Homo sapiens
agagcaaaactccgt

SEQ ID NO: 2118202 - DNA, 15 bp, Homo sapiens
gagcaaaactccgtc

SEQ ID NO: 2118203 - DNA, 15 bp, Homo sapiens
agcaaaactccgtct

SEQ ID NO: 2118204 - DNA, 15 bp, Homo sapiens
gcaaaactccgtctc

SEQ ID NO: 2118205 - DNA, 15 bp, Homo sapiens
caaaactccgtctca

SEQ ID NO: 2118206 - DNA, 15 bp, Homo sapiens
aaaactccgtctcaa

SEQ ID NO: 2118207 - DNA, 15 bp, Homo sapiens
aaaaaaaaaatcaca

SEQ ID NO: 2118208 - DNA, 15 bp, Homo sapiens
aaaaaaaaatcacat

SEQ ID NO: 2118209 - DNA, 15 bp, Homo sapiens
aaaaaaaatcacata

SEQ ID NO: 2118210 - DNA, 15 bp, Homo sapiens
aaaaaaatcacataa

SEQ ID NO: 2118211 - DNA, 15 bp, Homo sapiens
aaaaaatcacataat

SEQ ID NO: 2118212 - DNA, 15 bp, Homo sapiens
aaaaatcacataatt

SEQ ID NO: 2118213 - DNA, 15 bp, Homo sapiens
aaaatcacataattc

SEQ ID NO: 2118214 - DNA, 15 bp, Homo sapiens
aaatcacataattca

SEQ ID NO: 2118215 - DNA, 15 bp, Homo sapiens
aatcacataattcaa

SEQ ID NO: 2118216 - DNA, 15 bp, Homo sapiens
atcacataattcaac

SEQ ID NO: 2118217 - DNA, 15 bp, Homo sapiens
tcacataattcaaca

SEQ ID NO: 2118218 - DNA, 15 bp, Homo sapiens
cacataattcaacat

SEQ ID NO: 2118219 - DNA, 15 bp, Homo sapiens
acataattcaacatt

SEQ ID NO: 2118220 - DNA, 15 bp, Homo sapiens
cataattcaacattt

SEQ ID NO: 2118221 - DNA, 15 bp, Homo sapiens
ataattcaacatttt

SEQ ID NO: 2118222 - DNA, 15 bp, Homo sapiens
taattcaacattttc

SEQ ID NO: 2118223 - DNA, 15 bp, Homo sapiens
aattcaacattttca

SEQ ID NO: 2118224 - DNA, 15 bp, Homo sapiens
attcaacattttcat

SEQ ID NO: 2118225 - DNA, 15 bp, Homo sapiens
ttcaacattttcatt

SEQ ID NO: 2118226 - DNA, 15 bp, Homo sapiens
tcaacattttcattc

SEQ ID NO: 2118227 - DNA, 15 bp, Homo sapiens
caacattttcattct

SEQ ID NO: 2118228 - DNA, 15 bp, Homo sapiens
aacattttcattctc

SEQ ID NO: 2118229 - DNA, 15 bp, Homo sapiens
acattttcattctct

SEQ ID NO: 2118230 - DNA, 15 bp, Homo sapiens
cattttcattctcta

SEQ ID NO: 2118231 - DNA, 15 bp, Homo sapiens
attttcattctctaa

SEQ ID NO: 2118232 - DNA, 15 bp, Homo sapiens
ttttcattctctaag

SEQ ID NO: 2118233 - DNA, 15 bp, Homo sapiens
tttcattctctaagg

SEQ ID NO: 2118234 - DNA, 15 bp, Homo sapiens
ttcattctctaagga

SEQ ID NO: 2118235 - DNA, 15 bp, Homo sapiens
tcattctctaaggaa

SEQ ID NO: 2118236 - DNA, 15 bp, Homo sapiens
cattctctaaggaaa

SEQ ID NO: 2118237 - DNA, 15 bp, Homo sapiens
attctctaaggaaac

SEQ ID NO: 2118238 - DNA, 15 bp, Homo sapiens
ttctctaaggaaact

SEQ ID NO: 2118239 - DNA, 15 bp, Homo sapiens
tctctaaggaaactg

SEQ ID NO: 2118240 - DNA, 15 bp, Homo sapiens
ctctaaggaaactgg

SEQ ID NO: 2118241 - DNA, 15 bp, Homo sapiens
tctaaggaaactggg

SEQ ID NO: 2118242 - DNA, 15 bp, Homo sapiens
ctaaggaaactggga

SEQ ID NO: 2118243 - DNA, 15 bp, Homo sapiens
taaggaaactgggaa

SEQ ID NO: 2118244 - DNA, 15 bp, Homo sapiens
aaggaaactgggaac

SEQ ID NO: 2118245 - DNA, 15 bp, Homo sapiens
aggaaactgggaacc

SEQ ID NO: 2118246 - DNA, 15 bp, Homo sapiens
ggaaactgggaaccc

SEQ ID NO: 2118247 - DNA, 15 bp, Homo sapiens
gaaactgggaaccca

SEQ ID NO: 2118248 - DNA, 15 bp, Homo sapiens
aaactgggaacccag

SEQ ID NO: 2118249 - DNA, 15 bp, Homo sapiens
aactgggaacccaga

SEQ ID NO: 2118250 - DNA, 15 bp, Homo sapiens
actgggaacccagaa

SEQ ID NO: 2118251 - DNA, 15 bp, Homo sapiens
ctgggaacccagaag

SEQ ID NO: 2118252 - DNA, 15 bp, Homo sapiens
tgggaacccagaaga

SEQ ID NO: 2118253 - DNA, 15 bp, Homo sapiens
gggaacccagaagat

SEQ ID NO: 2118254 - DNA, 15 bp, Homo sapiens
ggaacccagaagatg

SEQ ID NO: 2118255 - DNA, 15 bp, Homo sapiens
gaacccagaagatga

SEQ ID NO: 2118256 - DNA, 15 bp, Homo sapiens
aacccagaagatgaa

SEQ ID NO: 2118257 - DNA, 15 bp, Homo sapiens
acccagaagatgaaa

SEQ ID NO: 2118258 - DNA, 15 bp, Homo sapiens
cccagaagatgaaac

SEQ ID NO: 2118259 - DNA, 15 bp, Homo sapiens
ccagaagatgaaact

SEQ ID NO: 2118260 - DNA, 15 bp, Homo sapiens
cagaagatgaaacta

SEQ ID NO: 2118261 - DNA, 15 bp, Homo sapiens
agaagatgaaactac

SEQ ID NO: 2118262 - DNA, 15 bp, Homo sapiens
gaagatgaaactacc

SEQ ID NO: 2118263 - DNA, 15 bp, Homo sapiens
aagatgaaactacct

SEQ ID NO: 2118264 - DNA, 15 bp, Homo sapiens
agatgaaactacctc

SEQ ID NO: 2118265 - DNA, 15 bp, Homo sapiens
gatgaaactacctca

SEQ ID NO: 2118266 - DNA, 15 bp, Homo sapiens
atgaaactacctcaa

SEQ ID NO: 2118267 - DNA, 15 bp, Homo sapiens
tgaaactacctcaat

SEQ ID NO: 2118268 - DNA, 15 bp, Homo sapiens
gaaactacctcaatg

SEQ ID NO: 2118269 - DNA, 15 bp, Homo sapiens
aaactacctcaatgt

SEQ ID NO: 2118270 - DNA, 15 bp, Homo sapiens
aactacctcaatgtt

SEQ ID NO: 2118271 - DNA, 15 bp, Homo sapiens
actacctcaatgtta

SEQ ID NO: 2118272 - DNA, 15 bp, Homo sapiens
ctacctcaatgttac

SEQ ID NO: 2118273 - DNA, 15 bp, Homo sapiens
tacctcaatgttaca

SEQ ID NO: 2118274 - DNA, 15 bp, Homo sapiens
acctcaatgttacac

SEQ ID NO: 2118275 - DNA, 15 bp, Homo sapiens
cctcaatgttacaca

SEQ ID NO: 2118276 - DNA, 15 bp, Homo sapiens
ctcaatgttacacaa

SEQ ID NO: 2118277 - DNA, 15 bp, Homo sapiens
tcaatgttacacaaa

SEQ ID NO: 2118278 - DNA, 15 bp, Homo sapiens
caatgttacacaaat

SEQ ID NO: 2118279 - DNA, 15 bp, Homo sapiens
aatgttacacaaata

SEQ ID NO: 2118280 - DNA, 15 bp, Homo sapiens
atgttacacaaatag

SEQ ID NO: 2118281 - DNA, 15 bp, Homo sapiens
tgttacacaaataga

SEQ ID NO: 2118282 - DNA, 15 bp, Homo sapiens
gttacacaaatagaa

SEQ ID NO: 2118283 - DNA, 15 bp, Homo sapiens
ttacacaaatagaag

SEQ ID NO: 2118284 - DNA, 15 bp, Homo sapiens
tacacaaatagaagg

SEQ ID NO: 2118285 - DNA, 15 bp, Homo sapiens
acacaaatagaaggt

SEQ ID NO: 2118286 - DNA, 15 bp, Homo sapiens
cacaaatagaaggta

SEQ ID NO: 2118287 - DNA, 15 bp, Homo sapiens
acaaatagaaggtaa

SEQ ID NO: 2118288 - DNA, 15 bp, Homo sapiens
caaatagaaggtaac

SEQ ID NO: 2118289 - DNA, 15 bp, Homo sapiens
aaatagaaggtaacc

SEQ ID NO: 2118290 - DNA, 15 bp, Homo sapiens
aatagaaggtaacca

SEQ ID NO: 2118291 - DNA, 15 bp, Homo sapiens
atagaaggtaaccaa

SEQ ID NO: 2118292 - DNA, 15 bp, Homo sapiens
tagaaggtaaccaag

SEQ ID NO: 2118293 - DNA, 15 bp, Homo sapiens
agaaggtaaccaagt

SEQ ID NO: 2118294 - DNA, 15 bp, Homo sapiens
gaaggtaaccaagtg

SEQ ID NO: 2118295 - DNA, 15 bp, Homo sapiens
aaggtaaccaagtga

SEQ ID NO: 2118296 - DNA, 15 bp, Homo sapiens
aggtaaccaagtgat

SEQ ID NO: 2118297 - DNA, 15 bp, Homo sapiens
ggtaaccaagtgata

SEQ ID NO: 2118298 - DNA, 15 bp, Homo sapiens
gtaaccaagtgatac

SEQ ID NO: 2118299 - DNA, 15 bp, Homo sapiens
taaccaagtgatact

SEQ ID NO: 2118300 - DNA, 15 bp, Homo sapiens
aaccaagtgatactt

SEQ ID NO: 2118301 - DNA, 15 bp, Homo sapiens
accaagtgatactta

SEQ ID NO: 2118302 - DNA, 15 bp, Homo sapiens
ccaagtgatacttaa

SEQ ID NO: 2118303 - DNA, 15 bp, Homo sapiens
caagtgatacttaaa

SEQ ID NO: 2118304 - DNA, 15 bp, Homo sapiens
aagtgatacttaaac

SEQ ID NO: 2118305 - DNA, 15 bp, Homo sapiens
agtgatacttaaacc

SEQ ID NO: 2118306 - DNA, 15 bp, Homo sapiens
gtgatacttaaaccc

SEQ ID NO: 2118307 - DNA, 15 bp, Homo sapiens
tgatacttaaaccca

SEQ ID NO: 2118308 - DNA, 15 bp, Homo sapiens
gatacttaaacccat

SEQ ID NO: 2118309 - DNA, 15 bp, Homo sapiens
atacttaaacccatg

SEQ ID NO: 2118310 - DNA, 15 bp, Homo sapiens
tacttaaacccatgt

SEQ ID NO: 2118311 - DNA, 15 bp, Homo sapiens
acttaaacccatgtc

SEQ ID NO: 2118312 - DNA, 15 bp, Homo sapiens
cttaaacccatgtct

SEQ ID NO: 2118313 - DNA, 15 bp, Homo sapiens
ttaaacccatgtctt

SEQ ID NO: 2118314 - DNA, 15 bp, Homo sapiens
taaacccatgtcttc

SEQ ID NO: 2118315 - DNA, 15 bp, Homo sapiens
aaacccatgtcttcc

SEQ ID NO: 2118316 - DNA, 15 bp, Homo sapiens
aacccatgtcttccc

SEQ ID NO: 2118317 - DNA, 15 bp, Homo sapiens
acccatgtcttccca

SEQ ID NO: 2118318 - DNA, 15 bp, Homo sapiens
cccatgtcttcccac

SEQ ID NO: 2118319 - DNA, 15 bp, Homo sapiens
ccatgtcttcccaca

SEQ ID NO: 2118320 - DNA, 15 bp, Homo sapiens
catgtcttcccacaa

SEQ ID NO: 2118321 - DNA, 15 bp, Homo sapiens
atgtcttcccacaat

SEQ ID NO: 2118322 - DNA, 15 bp, Homo sapiens
tgtcttcccacaatt

SEQ ID NO: 2118323 - DNA, 15 bp, Homo sapiens
gtcttcccacaattc

SEQ ID NO: 2118324 - DNA, 15 bp, Homo sapiens
tcttcccacaattca

SEQ ID NO: 2118325 - DNA, 15 bp, Homo sapiens
cttcccacaattcaa

SEQ ID NO: 2118326 - DNA, 15 bp, Homo sapiens
ttcccacaattcaaa

SEQ ID NO: 2118327 - DNA, 15 bp, Homo sapiens
tcccacaattcaaag

SEQ ID NO: 2118328 - DNA, 15 bp, Homo sapiens
cccacaattcaaagg

SEQ ID NO: 2118329 - DNA, 15 bp, Homo sapiens
ccacaattcaaaggt

SEQ ID NO: 2118330 - DNA, 15 bp, Homo sapiens
cacaattcaaaggtc

SEQ ID NO: 2118331 - DNA, 15 bp, Homo sapiens
acaattcaaaggtct

SEQ ID NO: 2118332 - DNA, 15 bp, Homo sapiens
caattcaaaggtctt

SEQ ID NO: 2118333 - DNA, 15 bp, Homo sapiens
aattcaaaggtcttt

SEQ ID NO: 2118334 - DNA, 15 bp, Homo sapiens
attcaaaggtctttt

SEQ ID NO: 2118335 - DNA, 15 bp, Homo sapiens
ttcaaaggtctttta

SEQ ID NO: 2118336 - DNA, 15 bp, Homo sapiens
tcaaaggtcttttaa

SEQ ID NO: 2118337 - DNA, 15 bp, Homo sapiens
caaaggtcttttaac

SEQ ID NO: 2118338 - DNA, 15 bp, Homo sapiens
aaaggtcttttaact

SEQ ID NO: 2118339 - DNA, 15 bp, Homo sapiens
aaggtcttttaactg

SEQ ID NO: 2118340 - DNA, 15 bp, Homo sapiens
aggtcttttaactgt

SEQ ID NO: 2118341 - DNA, 15 bp, Homo sapiens
ggtcttttaactgtg

SEQ ID NO: 2118342 - DNA, 15 bp, Homo sapiens
gtcttttaactgtgg

SEQ ID NO: 2118343 - DNA, 15 bp, Homo sapiens
cttttaactgtgggg

SEQ ID NO: 2118344 - DNA, 15 bp, Homo sapiens
ttttaactgtggggt

SEQ ID NO: 2118345 - DNA, 15 bp, Homo sapiens
tttaactgtggggtc

SEQ ID NO: 2118346 - DNA, 15 bp, Homo sapiens
ttaactgtggggtct

SEQ ID NO: 2118347 - DNA, 15 bp, Homo sapiens
taactgtggggtctg

SEQ ID NO: 2118348 - DNA, 15 bp, Homo sapiens
aactgtggggtctgt

SEQ ID NO: 2118349 - DNA, 15 bp, Homo sapiens
actgtggggtctgtg

SEQ ID NO: 2118350 - DNA, 15 bp, Homo sapiens
ctgtggggtctgtgc

SEQ ID NO: 2118351 - DNA, 15 bp, Homo sapiens
tgtggggtctgtgca

SEQ ID NO: 2118352 - DNA, 15 bp, Homo sapiens
gtggggtctgtgcat

SEQ ID NO: 2118353 - DNA, 15 bp, Homo sapiens
tggggtctgtgcata

SEQ ID NO: 2118354 - DNA, 15 bp, Homo sapiens
ggggtctgtgcatag

SEQ ID NO: 2118355 - DNA, 15 bp, Homo sapiens
gggtctgtgcataga

SEQ ID NO: 2118356 - DNA, 15 bp, Homo sapiens
ggtctgtgcatagat

SEQ ID NO: 2118357 - DNA, 15 bp, Homo sapiens
gtctgtgcatagatt

SEQ ID NO: 2118358 - DNA, 15 bp, Homo sapiens
tctgtgcatagattc

SEQ ID NO: 2118359 - DNA, 15 bp, Homo sapiens
ctgtgcatagattct

SEQ ID NO: 2118360 - DNA, 15 bp, Homo sapiens
tgtgcatagattctc

SEQ ID NO: 2118361 - DNA, 15 bp, Homo sapiens
gtgcatagattctca

SEQ ID NO: 2118362 - DNA, 15 bp, Homo sapiens
tgcatagattctcag

SEQ ID NO: 2118363 - DNA, 15 bp, Homo sapiens
gcatagattctcagg

SEQ ID NO: 2118364 - DNA, 15 bp, Homo sapiens
catagattctcagga

SEQ ID NO: 2118365 - DNA, 15 bp, Homo sapiens
atagattctcaggac

SEQ ID NO: 2118366 - DNA, 15 bp, Homo sapiens
tagattctcaggaca

SEQ ID NO: 2118367 - DNA, 15 bp, Homo sapiens
agattctcaggacat

SEQ ID NO: 2118368 - DNA, 15 bp, Homo sapiens
gattctcaggacata

SEQ ID NO: 2118369 - DNA, 15 bp, Homo sapiens
attctcaggacatat

SEQ ID NO: 2118370 - DNA, 15 bp, Homo sapiens
ttctcaggacatatg

SEQ ID NO: 2118371 - DNA, 15 bp, Homo sapiens
tctcaggacatatgg

SEQ ID NO: 2118372 - DNA, 15 bp, Homo sapiens
ctcaggacatatggg

SEQ ID NO: 2118373 - DNA, 15 bp, Homo sapiens
tcaggacatatgggg

SEQ ID NO: 2118374 - DNA, 15 bp, Homo sapiens
caggacatatgggga

SEQ ID NO: 2118375 - DNA, 15 bp, Homo sapiens
aggacatatggggag

SEQ ID NO: 2118376 - DNA, 15 bp, Homo sapiens
ggacatatggggagc

SEQ ID NO: 2118377 - DNA, 15 bp, Homo sapiens
gacatatggggagct

SEQ ID NO: 2118378 - DNA, 15 bp, Homo sapiens
acatatggggagctt

SEQ ID NO: 2118379 - DNA, 15 bp, Homo sapiens
catatggggagcttt

SEQ ID NO: 2118380 - DNA, 15 bp, Homo sapiens
atatggggagctttc

SEQ ID NO: 2118381 - DNA, 15 bp, Homo sapiens
tatggggagctttct

SEQ ID NO: 2118382 - DNA, 15 bp, Homo sapiens
atggggagctttcta

SEQ ID NO: 2118383 - DNA, 15 bp, Homo sapiens
tggggagctttctac

SEQ ID NO: 2118384 - DNA, 15 bp, Homo sapiens
ggggagctttctaca

SEQ ID NO: 2118385 - DNA, 15 bp, Homo sapiens
gggagctttctacaa

SEQ ID NO: 2118386 - DNA, 15 bp, Homo sapiens
ggagctttctacaaa

SEQ ID NO: 2118387 - DNA, 15 bp, Homo sapiens
gagctttctacaaaa

SEQ ID NO: 2118388 - DNA, 15 bp, Homo sapiens
agctttctacaaaac

SEQ ID NO: 2118389 - DNA, 15 bp, Homo sapiens
gctttctacaaaact

SEQ ID NO: 2118390 - DNA, 15 bp, Homo sapiens
ctttctacaaaactt

SEQ ID NO: 2118391 - DNA, 15 bp, Homo sapiens
tttctacaaaacttt

SEQ ID NO: 2118392 - DNA, 15 bp, Homo sapiens
ttctacaaaactttc

SEQ ID NO: 2118393 - DNA, 15 bp, Homo sapiens
tctacaaaactttca

SEQ ID NO: 2118394 - DNA, 15 bp, Homo sapiens
ctacaaaactttcac

SEQ ID NO: 2118395 - DNA, 15 bp, Homo sapiens
tacaaaactttcaca

SEQ ID NO: 2118396 - DNA, 15 bp, Homo sapiens
acaaaactttcacaa

SEQ ID NO: 2118397 - DNA, 15 bp, Homo sapiens
caaaactttcacaat

SEQ ID NO: 2118398 - DNA, 15 bp, Homo sapiens
aaaactttcacaata

SEQ ID NO: 2118399 - DNA, 15 bp, Homo sapiens
aaactttcacaatac

SEQ ID NO: 2118400 - DNA, 15 bp, Homo sapiens
aactttcacaatact

SEQ ID NO: 2118401 - DNA, 15 bp, Homo sapiens
actttcacaatactc

SEQ ID NO: 2118402 - DNA, 15 bp, Homo sapiens
ctttcacaatactct

SEQ ID NO: 2118403 - DNA, 15 bp, Homo sapiens
tttcacaatactctc

SEQ ID NO: 2118404 - DNA, 15 bp, Homo sapiens
ttcacaatactctca

SEQ ID NO: 2118405 - DNA, 15 bp, Homo sapiens
tcacaatactctcat

SEQ ID NO: 2118406 - DNA, 15 bp, Homo sapiens
cacaatactctcatt

SEQ ID NO: 2118407 - DNA, 15 bp, Homo sapiens
acaatactctcattt

SEQ ID NO: 2118408 - DNA, 15 bp, Homo sapiens
caatactctcatttc

SEQ ID NO: 2118409 - DNA, 15 bp, Homo sapiens
aatactctcatttca

SEQ ID NO: 2118410 - DNA, 15 bp, Homo sapiens
atactctcatttcac

SEQ ID NO: 2118411 - DNA, 15 bp, Homo sapiens
tactctcatttcact

SEQ ID NO: 2118412 - DNA, 15 bp, Homo sapiens
actctcatttcactg

SEQ ID NO: 2118413 - DNA, 15 bp, Homo sapiens
ctctcatttcactgt

SEQ ID NO: 2118414 - DNA, 15 bp, Homo sapiens
tctcatttcactgta

SEQ ID NO: 2118415 - DNA, 15 bp, Homo sapiens
ctcatttcactgtaa

SEQ ID NO: 2118416 - DNA, 15 bp, Homo sapiens
tcatttcactgtaag

SEQ ID NO: 2118417 - DNA, 15 bp, Homo sapiens
catttcactgtaagg

SEQ ID NO: 2118418 - DNA, 15 bp, Homo sapiens
atttcactgtaagga

SEQ ID NO: 2118419 - DNA, 15 bp, Homo sapiens
tttcactgtaaggat

SEQ ID NO: 2118420 - DNA, 15 bp, Homo sapiens
ttcactgtaaggata

SEQ ID NO: 2118421 - DNA, 15 bp, Homo sapiens
tcactgtaaggatag

SEQ ID NO: 2118422 - DNA, 15 bp, Homo sapiens
cactgtaaggatagt

SEQ ID NO: 2118423 - DNA, 15 bp, Homo sapiens
actgtaaggatagtt

SEQ ID NO: 2118424 - DNA, 15 bp, Homo sapiens
ctgtaaggatagttt

SEQ ID NO: 2118425 - DNA, 15 bp, Homo sapiens
tgtaaggatagttta

SEQ ID NO: 2118426 - DNA, 15 bp, Homo sapiens
gtaaggatagtttag

SEQ ID NO: 2118427 - DNA, 15 bp, Homo sapiens
taaggatagtttaga

SEQ ID NO: 2118428 - DNA, 15 bp, Homo sapiens
aaggatagtttagat

SEQ ID NO: 2118429 - DNA, 15 bp, Homo sapiens
aggatagtttagatc

SEQ ID NO: 2118430 - DNA, 15 bp, Homo sapiens
ggatagtttagatca

SEQ ID NO: 2118431 - DNA, 15 bp, Homo sapiens
gatagtttagatcag

SEQ ID NO: 2118432 - DNA, 15 bp, Homo sapiens
atagtttagatcagc

SEQ ID NO: 2118433 - DNA, 15 bp, Homo sapiens
tagtttagatcagct

SEQ ID NO: 2118434 - DNA, 15 bp, Homo sapiens
agtttagatcagcta

SEQ ID NO: 2118435 - DNA, 15 bp, Homo sapiens
gtttagatcagctat

SEQ ID NO: 2118436 - DNA, 15 bp, Homo sapiens
tttagatcagctata

SEQ ID NO: 2118437 - DNA, 15 bp, Homo sapiens
ttagatcagctatat

SEQ ID NO: 2118438 - DNA, 15 bp, Homo sapiens
tagatcagctatatg

SEQ ID NO: 2118439 - DNA, 15 bp, Homo sapiens
agatcagctatatga

SEQ ID NO: 2118440 - DNA, 15 bp, Homo sapiens
gatcagctatatgac

SEQ ID NO: 2118441 - DNA, 15 bp, Homo sapiens
atcagctatatgact

SEQ ID NO: 2118442 - DNA, 15 bp, Homo sapiens
tcagctatatgacta

SEQ ID NO: 2118443 - DNA, 15 bp, Homo sapiens
cagctatatgactac

SEQ ID NO: 2118444 - DNA, 15 bp, Homo sapiens
agctatatgactact

SEQ ID NO: 2118445 - DNA, 15 bp, Homo sapiens
gctatatgactactt

SEQ ID NO: 2118446 - DNA, 15 bp, Homo sapiens
ctatatgactacttc

SEQ ID NO: 2118447 - DNA, 15 bp, Homo sapiens
tatatgactacttca

SEQ ID NO: 2118448 - DNA, 15 bp, Homo sapiens
atatgactacttcat

SEQ ID NO: 2118449 - DNA, 15 bp, Homo sapiens
tatgactacttcata

SEQ ID NO: 2118450 - DNA, 15 bp, Homo sapiens
atgactacttcataa

SEQ ID NO: 2118451 - DNA, 15 bp, Homo sapiens
tgactacttcataat

SEQ ID NO: 2118452 - DNA, 15 bp, Homo sapiens
gactacttcataata

SEQ ID NO: 2118453 - DNA, 15 bp, Homo sapiens
actacttcataatat

SEQ ID NO: 2118454 - DNA, 15 bp, Homo sapiens
ctacttcataatata

SEQ ID NO: 2118455 - DNA, 15 bp, Homo sapiens
tacttcataatatag

SEQ ID NO: 2118456 - DNA, 15 bp, Homo sapiens
acttcataatatagg

SEQ ID NO: 2118457 - DNA, 15 bp, Homo sapiens
cttcataatatagga

SEQ ID NO: 2118458 - DNA, 15 bp, Homo sapiens
ttcataatataggac

SEQ ID NO: 2118459 - DNA, 15 bp, Homo sapiens
tcataatataggacc

SEQ ID NO: 2118460 - DNA, 15 bp, Homo sapiens
cataatataggacca

SEQ ID NO: 2118461 - DNA, 15 bp, Homo sapiens
ataatataggaccac

SEQ ID NO: 2118462 - DNA, 15 bp, Homo sapiens
taatataggaccacg

SEQ ID NO: 2118463 - DNA, 15 bp, Homo sapiens
aatataggaccacgt

SEQ ID NO: 2118464 - DNA, 15 bp, Homo sapiens
atataggaccacgtt

SEQ ID NO: 2118465 - DNA, 15 bp, Homo sapiens
tataggaccacgttg

SEQ ID NO: 2118466 - DNA, 15 bp, Homo sapiens
ataggaccacgttgc

SEQ ID NO: 2118467 - DNA, 15 bp, Homo sapiens
taggaccacgttgcc

SEQ ID NO: 2118468 - DNA, 15 bp, Homo sapiens
aggaccacgttgcca

SEQ ID NO: 2118469 - DNA, 15 bp, Homo sapiens
ggaccacgttgccag

SEQ ID NO: 2118470 - DNA, 15 bp, Homo sapiens
gaccacgttgccaga

SEQ ID NO: 2118471 - DNA, 15 bp, Homo sapiens
accacgttgccagat

SEQ ID NO: 2118472 - DNA, 15 bp, Homo sapiens
ccacgttgccagatt

SEQ ID NO: 2118473 - DNA, 15 bp, Homo sapiens
cacgttgccagatta

SEQ ID NO: 2118474 - DNA, 15 bp, Homo sapiens
acgttgccagattag

SEQ ID NO: 2118475 - DNA, 15 bp, Homo sapiens
cgttgccagattagt

SEQ ID NO: 2118476 - DNA, 15 bp, Homo sapiens
gttgccagattagtg

SEQ ID NO: 2118477 - DNA, 15 bp, Homo sapiens
ttgccagattagtgg

SEQ ID NO: 2118478 - DNA, 15 bp, Homo sapiens
tgccagattagtggc

SEQ ID NO: 2118479 - DNA, 15 bp, Homo sapiens
gccagattagtggca

SEQ ID NO: 2118480 - DNA, 15 bp, Homo sapiens
ccagattagtggcaa

SEQ ID NO: 2118481 - DNA, 15 bp, Homo sapiens
cagattagtggcaaa

SEQ ID NO: 2118482 - DNA, 15 bp, Homo sapiens
agattagtggcaaat

SEQ ID NO: 2118483 - DNA, 15 bp, Homo sapiens
gattagtggcaaatg

SEQ ID NO: 2118484 - DNA, 15 bp, Homo sapiens
attagtggcaaatgt

SEQ ID NO: 2118485 - DNA, 15 bp, Homo sapiens
ttagtggcaaatgtt

SEQ ID NO: 2118486 - DNA, 15 bp, Homo sapiens
tagtggcaaatgttc

SEQ ID NO: 2118487 - DNA, 15 bp, Homo sapiens
agtggcaaatgttct

SEQ ID NO: 2118488 - DNA, 15 bp, Homo sapiens
gtggcaaatgttcta

SEQ ID NO: 2118489 - DNA, 15 bp, Homo sapiens
tggcaaatgttctag

SEQ ID NO: 2118490 - DNA, 15 bp, Homo sapiens
ggcaaatgttctagt

SEQ ID NO: 2118491 - DNA, 15 bp, Homo sapiens
gcaaatgttctagtt

SEQ ID NO: 2118492 - DNA, 15 bp, Homo sapiens
caaatgttctagttt

SEQ ID NO: 2118493 - DNA, 15 bp, Homo sapiens
aaatgttctagtttt

SEQ ID NO: 2118494 - DNA, 15 bp, Homo sapiens
aatgttctagttttg

SEQ ID NO: 2118495 - DNA, 15 bp, Homo sapiens
atgttctagttttgt

SEQ ID NO: 2118496 - DNA, 15 bp, Homo sapiens
tgttctagttttgtt

SEQ ID NO: 2118497 - DNA, 15 bp, Homo sapiens
gttctagttttgttg

SEQ ID NO: 2118498 - DNA, 15 bp, Homo sapiens
ttctagttttgttgc

SEQ ID NO: 2118499 - DNA, 15 bp, Homo sapiens
tctagttttgttgcc

SEQ ID NO: 2118500 - DNA, 15 bp, Homo sapiens
ctagttttgttgcct

SEQ ID NO: 2118501 - DNA, 15 bp, Homo sapiens
tagttttgttgcctg

SEQ ID NO: 2118502 - DNA, 15 bp, Homo sapiens
agttttgttgcctgg

SEQ ID NO: 2118503 - DNA, 15 bp, Homo sapiens
gttttgttgcctggg

SEQ ID NO: 2118504 - DNA, 15 bp, Homo sapiens
ttttgttgcctgggg

SEQ ID NO: 2118505 - DNA, 15 bp, Homo sapiens
tttgttgcctgggga

SEQ ID NO: 2118506 - DNA, 15 bp, Homo sapiens
ttgttgcctggggat

SEQ ID NO: 2118507 - DNA, 15 bp, Homo sapiens
tgttgcctggggatt

SEQ ID NO: 2118508 - DNA, 15 bp, Homo sapiens
gttgcctggggatta

SEQ ID NO: 2118509 - DNA, 15 bp, Homo sapiens
ttgcctggggattac

SEQ ID NO: 2118510 - DNA, 15 bp, Homo sapiens
tgcctggggattaca

SEQ ID NO: 2118511 - DNA, 15 bp, Homo sapiens
gcctggggattacag

SEQ ID NO: 2118512 - DNA, 15 bp, Homo sapiens
cctggggattacaga

SEQ ID NO: 2118513 - DNA, 15 bp, Homo sapiens
ctggggattacagaa

SEQ ID NO: 2118514 - DNA, 15 bp, Homo sapiens
tggggattacagaaa

SEQ ID NO: 2118515 - DNA, 15 bp, Homo sapiens
ggggattacagaaaa

SEQ ID NO: 2118516 - DNA, 15 bp, Homo sapiens
gggattacagaaaag

SEQ ID NO: 2118517 - DNA, 15 bp, Homo sapiens
ggattacagaaaaga

SEQ ID NO: 2118518 - DNA, 15 bp, Homo sapiens
gattacagaaaagaa

SEQ ID NO: 2118519 - DNA, 15 bp, Homo sapiens
attacagaaaagaag

SEQ ID NO: 2118520 - DNA, 15 bp, Homo sapiens
ttacagaaaagaaga

SEQ ID NO: 2118521 - DNA, 15 bp, Homo sapiens
tacagaaaagaagag

SEQ ID NO: 2118522 - DNA, 15 bp, Homo sapiens
acagaaaagaagaga

SEQ ID NO: 2118523 - DNA, 15 bp, Homo sapiens
cagaaaagaagagaa

SEQ ID NO: 2118524 - DNA, 15 bp, Homo sapiens
agaaaagaagagaag

SEQ ID NO: 2118525 - DNA, 15 bp, Homo sapiens
gaaaagaagagaagc

SEQ ID NO: 2118526 - DNA, 15 bp, Homo sapiens
aaaagaagagaagca

SEQ ID NO: 2118527 - DNA, 15 bp, Homo sapiens
aaagaagagaagcaa

SEQ ID NO: 2118528 - DNA, 15 bp, Homo sapiens
aagaagagaagcaaa

SEQ ID NO: 2118529 - DNA, 15 bp, Homo sapiens
agaagagaagcaaac

SEQ ID NO: 2118530 - DNA, 15 bp, Homo sapiens
gaagagaagcaaaca

SEQ ID NO: 2118531 - DNA, 15 bp, Homo sapiens
aagagaagcaaacaa

SEQ ID NO: 2118532 - DNA, 15 bp, Homo sapiens
agagaagcaaacaat

SEQ ID NO: 2118533 - DNA, 15 bp, Homo sapiens
gagaagcaaacaata

SEQ ID NO: 2118534 - DNA, 15 bp, Homo sapiens
agaagcaaacaatat

SEQ ID NO: 2118535 - DNA, 15 bp, Homo sapiens
gaagcaaacaatata

SEQ ID NO: 2118536 - DNA, 15 bp, Homo sapiens
aagcaaacaatatat

SEQ ID NO: 2118537 - DNA, 15 bp, Homo sapiens
agcaaacaatatata

SEQ ID NO: 2118538 - DNA, 15 bp, Homo sapiens
gcaaacaatatataa

SEQ ID NO: 2118539 - DNA, 15 bp, Homo sapiens
caaacaatatataaa

SEQ ID NO: 2118540 - DNA, 15 bp, Homo sapiens
aaacaatatataaat

SEQ ID NO: 2118541 - DNA, 15 bp, Homo sapiens
aacaatatataaatg

SEQ ID NO: 2118542 - DNA, 15 bp, Homo sapiens
acaatatataaatgt

SEQ ID NO: 2118543 - DNA, 15 bp, Homo sapiens
caatatataaatgtg

SEQ ID NO: 2118544 - DNA, 15 bp, Homo sapiens
aatatataaatgtgt

SEQ ID NO: 2118545 - DNA, 15 bp, Homo sapiens
atatataaatgtgtt

SEQ ID NO: 2118546 - DNA, 15 bp, Homo sapiens
tatataaatgtgttt

SEQ ID NO: 2118547 - DNA, 15 bp, Homo sapiens
atataaatgtgtttt

SEQ ID NO: 2118548 - DNA, 15 bp, Homo sapiens
tataaatgtgttttg

SEQ ID NO: 2118549 - DNA, 15 bp, Homo sapiens
ataaatgtgttttgt

SEQ ID NO: 2118550 - DNA, 15 bp, Homo sapiens
taaatgtgttttgtg

SEQ ID NO: 2118551 - DNA, 15 bp, Homo sapiens
aaatgtgttttgtgc

SEQ ID NO: 2118552 - DNA, 15 bp, Homo sapiens
aatgtgttttgtgcc

SEQ ID NO: 2118553 - DNA, 15 bp, Homo sapiens
atgtgttttgtgcca

SEQ ID NO: 2118554 - DNA, 15 bp, Homo sapiens
tgtgttttgtgccaa

SEQ ID NO: 2118555 - DNA, 15 bp, Homo sapiens
gtgttttgtgccaaa

SEQ ID NO: 2118556 - DNA, 15 bp, Homo sapiens
tgttttgtgccaaat

SEQ ID NO: 2118557 - DNA, 15 bp, Homo sapiens
gttttgtgccaaatg

SEQ ID NO: 2118558 - DNA, 15 bp, Homo sapiens
ttttgtgccaaatga

SEQ ID NO: 2118559 - DNA, 15 bp, Homo sapiens
tttgtgccaaatgaa

SEQ ID NO: 2118560 - DNA, 15 bp, Homo sapiens
ttgtgccaaatgaaa

SEQ ID NO: 2118561 - DNA, 15 bp, Homo sapiens
tgtgccaaatgaaag

SEQ ID NO: 2118562 - DNA, 15 bp, Homo sapiens
gtgccaaatgaaagt

SEQ ID NO: 2118563 - DNA, 15 bp, Homo sapiens
tgccaaatgaaagtg

SEQ ID NO: 2118564 - DNA, 15 bp, Homo sapiens
gccaaatgaaagtga

SEQ ID NO: 2118565 - DNA, 15 bp, Homo sapiens
ccaaatgaaagtgaa

SEQ ID NO: 2118566 - DNA, 15 bp, Homo sapiens
caaatgaaagtgaaa

SEQ ID NO: 2118567 - DNA, 15 bp, Homo sapiens
aaatgaaagtgaaat

SEQ ID NO: 2118568 - DNA, 15 bp, Homo sapiens
aatgaaagtgaaata

SEQ ID NO: 2118569 - DNA, 15 bp, Homo sapiens
atgaaagtgaaatag

SEQ ID NO: 2118570 - DNA, 15 bp, Homo sapiens
tgaaagtgaaatagc

SEQ ID NO: 2118571 - DNA, 15 bp, Homo sapiens
gaaagtgaaatagca

SEQ ID NO: 2118572 - DNA, 15 bp, Homo sapiens
aaagtgaaatagcat

SEQ ID NO: 2118573 - DNA, 15 bp, Homo sapiens
aagtgaaatagcatt

SEQ ID NO: 2118574 - DNA, 15 bp, Homo sapiens
agtgaaatagcattg

SEQ ID NO: 2118575 - DNA, 15 bp, Homo sapiens
gtgaaatagcattgc

SEQ ID NO: 2118576 - DNA, 15 bp, Homo sapiens
tgaaatagcattgct

SEQ ID NO: 2118577 - DNA, 15 bp, Homo sapiens
gaaatagcattgcta

SEQ ID NO: 2118578 - DNA, 15 bp, Homo sapiens
aaatagcattgctat

SEQ ID NO: 2118579 - DNA, 15 bp, Homo sapiens
aatagcattgctatg

SEQ ID NO: 2118580 - DNA, 15 bp, Homo sapiens
atagcattgctatgt

SEQ ID NO: 2118581 - DNA, 15 bp, Homo sapiens
tagcattgctatgtg

SEQ ID NO: 2118582 - DNA, 15 bp, Homo sapiens
agcattgctatgtgc

SEQ ID NO: 2118583 - DNA, 15 bp, Homo sapiens
gcattgctatgtgct

SEQ ID NO: 2118584 - DNA, 15 bp, Homo sapiens
cattgctatgtgcta

SEQ ID NO: 2118585 - DNA, 15 bp, Homo sapiens
attgctatgtgctat

SEQ ID NO: 2118586 - DNA, 15 bp, Homo sapiens
ttgctatgtgctata

SEQ ID NO: 2118587 - DNA, 15 bp, Homo sapiens
tgctatgtgctataa

SEQ ID NO: 2118588 - DNA, 15 bp, Homo sapiens
gctatgtgctataat

SEQ ID NO: 2118589 - DNA, 15 bp, Homo sapiens
ctatgtgctataatg

SEQ ID NO: 2118590 - DNA, 15 bp, Homo sapiens
tatgtgctataatgg

SEQ ID NO: 2118591 - DNA, 15 bp, Homo sapiens
atgtgctataatggc

SEQ ID NO: 2118592 - DNA, 15 bp, Homo sapiens
tgtgctataatggca

SEQ ID NO: 2118593 - DNA, 15 bp, Homo sapiens
gtgctataatggcag

SEQ ID NO: 2118594 - DNA, 15 bp, Homo sapiens
tgctataatggcagg

SEQ ID NO: 2118595 - DNA, 15 bp, Homo sapiens
gctataatggcagga

SEQ ID NO: 2118596 - DNA, 15 bp, Homo sapiens
ctataatggcaggat

SEQ ID NO: 2118597 - DNA, 15 bp, Homo sapiens
tataatggcaggatt

SEQ ID NO: 2118598 - DNA, 15 bp, Homo sapiens
ataatggcaggattt

SEQ ID NO: 2118599 - DNA, 15 bp, Homo sapiens
taatggcaggattta

SEQ ID NO: 2118600 - DNA, 15 bp, Homo sapiens
aatggcaggatttaa

SEQ ID NO: 2118601 - DNA, 15 bp, Homo sapiens
atggcaggatttaaa

SEQ ID NO: 2118602 - DNA, 15 bp, Homo sapiens
tggcaggatttaaag

SEQ ID NO: 2118603 - DNA, 15 bp, Homo sapiens
ggcaggatttaaagc

SEQ ID NO: 2118604 - DNA, 15 bp, Homo sapiens
gcaggatttaaagca

SEQ ID NO: 2118605 - DNA, 15 bp, Homo sapiens
caggatttaaagcag

SEQ ID NO: 2118606 - DNA, 15 bp, Homo sapiens
aggatttaaagcagt

SEQ ID NO: 2118607 - DNA, 15 bp, Homo sapiens
ggatttaaagcagtt

SEQ ID NO: 2118608 - DNA, 15 bp, Homo sapiens
gatttaaagcagttt

SEQ ID NO: 2118609 - DNA, 15 bp, Homo sapiens
atttaaagcagtttg

SEQ ID NO: 2118610 - DNA, 15 bp, Homo sapiens
tttaaagcagtttga

SEQ ID NO: 2118611 - DNA, 15 bp, Homo sapiens
ttaaagcagtttgaa

SEQ ID NO: 2118612 - DNA, 15 bp, Homo sapiens
taaagcagtttgaaa

SEQ ID NO: 2118613 - DNA, 15 bp, Homo sapiens
aaagcagtttgaaaa

SEQ ID NO: 2118614 - DNA, 15 bp, Homo sapiens
aagcagtttgaaaac

SEQ ID NO: 2118615 - DNA, 15 bp, Homo sapiens
agcagtttgaaaaca

SEQ ID NO: 2118616 - DNA, 15 bp, Homo sapiens
gcagtttgaaaacag

SEQ ID NO: 2118617 - DNA, 15 bp, Homo sapiens
cagtttgaaaacagc

SEQ ID NO: 2118618 - DNA, 15 bp, Homo sapiens
agtttgaaaacagca

SEQ ID NO: 2118619 - DNA, 15 bp, Homo sapiens
gtttgaaaacagcag

SEQ ID NO: 2118620 - DNA, 15 bp, Homo sapiens
tttgaaaacagcagt

SEQ ID NO: 2118621 - DNA, 15 bp, Homo sapiens
ttgaaaacagcagtt

SEQ ID NO: 2118622 - DNA, 15 bp, Homo sapiens
tgaaaacagcagttt

SEQ ID NO: 2118623 - DNA, 15 bp, Homo sapiens
gaaaacagcagtttg

SEQ ID NO: 2118624 - DNA, 15 bp, Homo sapiens
aaaacagcagtttgg

SEQ ID NO: 2118625 - DNA, 15 bp, Homo sapiens
aaacagcagtttggt

SEQ ID NO: 2118626 - DNA, 15 bp, Homo sapiens
aacagcagtttggtg

SEQ ID NO: 2118627 - DNA, 15 bp, Homo sapiens
acagcagtttggtga

SEQ ID NO: 2118628 - DNA, 15 bp, Homo sapiens
cagcagtttggtgaa

SEQ ID NO: 2118629 - DNA, 15 bp, Homo sapiens
agcagtttggtgaag

SEQ ID NO: 2118630 - DNA, 15 bp, Homo sapiens
gcagtttggtgaagt

SEQ ID NO: 2118631 - DNA, 15 bp, Homo sapiens
cagtttggtgaagtg

SEQ ID NO: 2118632 - DNA, 15 bp, Homo sapiens
agtttggtgaagtgc

SEQ ID NO: 2118633 - DNA, 15 bp, Homo sapiens
gtttggtgaagtgca

SEQ ID NO: 2118634 - DNA, 15 bp, Homo sapiens
tttggtgaagtgcat

SEQ ID NO: 2118635 - DNA, 15 bp, Homo sapiens
ttggtgaagtgcatc

SEQ ID NO: 2118636 - DNA, 15 bp, Homo sapiens
tggtgaagtgcatca

SEQ ID NO: 2118637 - DNA, 15 bp, Homo sapiens
ggtgaagtgcatcaa

SEQ ID NO: 2118638 - DNA, 15 bp, Homo sapiens
gtgaagtgcatcaac

SEQ ID NO: 2118639 - DNA, 15 bp, Homo sapiens
tgaagtgcatcaaca

SEQ ID NO: 2118640 - DNA, 15 bp, Homo sapiens
gaagtgcatcaacac

SEQ ID NO: 2118641 - DNA, 15 bp, Homo sapiens
aagtgcatcaacaca

SEQ ID NO: 2118642 - DNA, 15 bp, Homo sapiens
agtgcatcaacacag

SEQ ID NO: 2118643 - DNA, 15 bp, Homo sapiens
gtgcatcaacacagc

SEQ ID NO: 2118644 - DNA, 15 bp, Homo sapiens
tgcatcaacacagca

SEQ ID NO: 2118645 - DNA, 15 bp, Homo sapiens
gcatcaacacagcat

SEQ ID NO: 2118646 - DNA, 15 bp, Homo sapiens
catcaacacagcatg

SEQ ID NO: 2118647 - DNA, 15 bp, Homo sapiens
atcaacacagcatgt

SEQ ID NO: 2118648 - DNA, 15 bp, Homo sapiens
tcaacacagcatgtg

SEQ ID NO: 2118649 - DNA, 15 bp, Homo sapiens
caacacagcatgtga

SEQ ID NO: 2118650 - DNA, 15 bp, Homo sapiens
aacacagcatgtgat

SEQ ID NO: 2118651 - DNA, 15 bp, Homo sapiens
acacagcatgtgata

SEQ ID NO: 2118652 - DNA, 15 bp, Homo sapiens
cacagcatgtgatat

SEQ ID NO: 2118653 - DNA, 15 bp, Homo sapiens
acagcatgtgatatt

SEQ ID NO: 2118654 - DNA, 15 bp, Homo sapiens
cagcatgtgatatta

SEQ ID NO: 2118655 - DNA, 15 bp, Homo sapiens
agcatgtgatattac

SEQ ID NO: 2118656 - DNA, 15 bp, Homo sapiens
gcatgtgatattaca

SEQ ID NO: 2118657 - DNA, 15 bp, Homo sapiens
catgtgatattacag

SEQ ID NO: 2118658 - DNA, 15 bp, Homo sapiens
atgtgatattacaga

SEQ ID NO: 2118659 - DNA, 15 bp, Homo sapiens
tgtgatattacagac

SEQ ID NO: 2118660 - DNA, 15 bp, Homo sapiens
gtgatattacagaca

SEQ ID NO: 2118661 - DNA, 15 bp, Homo sapiens
tgatattacagacac

SEQ ID NO: 2118662 - DNA, 15 bp, Homo sapiens
gatattacagacacg

SEQ ID NO: 2118663 - DNA, 15 bp, Homo sapiens
atattacagacacgc

SEQ ID NO: 2118664 - DNA, 15 bp, Homo sapiens
tattacagacacgcc

SEQ ID NO: 2118665 - DNA, 15 bp, Homo sapiens
attacagacacgcca

SEQ ID NO: 2118666 - DNA, 15 bp, Homo sapiens
ttacagacacgccac

SEQ ID NO: 2118667 - DNA, 15 bp, Homo sapiens
tacagacacgccact

SEQ ID NO: 2118668 - DNA, 15 bp, Homo sapiens
acagacacgccactc

SEQ ID NO: 2118669 - DNA, 15 bp, Homo sapiens
cagacacgccactca

SEQ ID NO: 2118670 - DNA, 15 bp, Homo sapiens
agacacgccactcaa

SEQ ID NO: 2118671 - DNA, 15 bp, Homo sapiens
gacacgccactcaaa

SEQ ID NO: 2118672 - DNA, 15 bp, Homo sapiens
acacgccactcaaaa

SEQ ID NO: 2118673 - DNA, 15 bp, Homo sapiens
cacgccactcaaaag

SEQ ID NO: 2118674 - DNA, 15 bp, Homo sapiens
acgccactcaaaaga

SEQ ID NO: 2118675 - DNA, 15 bp, Homo sapiens
cgccactcaaaagaa

SEQ ID NO: 2118676 - DNA, 15 bp, Homo sapiens
gccactcaaaagaaa

SEQ ID NO: 2118677 - DNA, 15 bp, Homo sapiens
ccactcaaaagaaac

SEQ ID NO: 2118678 - DNA, 15 bp, Homo sapiens
cactcaaaagaaact

SEQ ID NO: 2118679 - DNA, 15 bp, Homo sapiens
actcaaaagaaacta

SEQ ID NO: 2118680 - DNA, 15 bp, Homo sapiens
ctcaaaagaaactat

SEQ ID NO: 2118681 - DNA, 15 bp, Homo sapiens
tcaaaagaaactata

SEQ ID NO: 2118682 - DNA, 15 bp, Homo sapiens
caaaagaaactataa

SEQ ID NO: 2118683 - DNA, 15 bp, Homo sapiens
aaaagaaactataat

SEQ ID NO: 2118684 - DNA, 15 bp, Homo sapiens
aaagaaactataata

SEQ ID NO: 2118685 - DNA, 15 bp, Homo sapiens
aagaaactataatac

SEQ ID NO: 2118686 - DNA, 15 bp, Homo sapiens
agaaactataatact

SEQ ID NO: 2118687 - DNA, 15 bp, Homo sapiens
gaaactataatacta

SEQ ID NO: 2118688 - DNA, 15 bp, Homo sapiens
aaactataatactat

SEQ ID NO: 2118689 - DNA, 15 bp, Homo sapiens
aactataatactata

SEQ ID NO: 2118690 - DNA, 15 bp, Homo sapiens
actataatactataa

SEQ ID NO: 2118691 - DNA, 15 bp, Homo sapiens
ctataatactataat

SEQ ID NO: 2118692 - DNA, 15 bp, Homo sapiens
tataatactataata

SEQ ID NO: 2118693 - DNA, 15 bp, Homo sapiens
ataatactataatag

SEQ ID NO: 2118694 - DNA, 15 bp, Homo sapiens
taatactataatagt

SEQ ID NO: 2118695 - DNA, 15 bp, Homo sapiens
aatactataatagta

SEQ ID NO: 2118696 - DNA, 15 bp, Homo sapiens
atactataatagtag

SEQ ID NO: 2118697 - DNA, 15 bp, Homo sapiens
tactataatagtagt

SEQ ID NO: 2118698 - DNA, 15 bp, Homo sapiens
actataatagtagtg

SEQ ID NO: 2118699 - DNA, 15 bp, Homo sapiens
ctataatagtagtgc

SEQ ID NO: 2118700 - DNA, 15 bp, Homo sapiens
tataatagtagtgcc

SEQ ID NO: 2118701 - DNA, 15 bp, Homo sapiens
ataatagtagtgcca

SEQ ID NO: 2118702 - DNA, 15 bp, Homo sapiens
taatagtagtgccat

SEQ ID NO: 2118703 - DNA, 15 bp, Homo sapiens
aatagtagtgccata

SEQ ID NO: 2118704 - DNA, 15 bp, Homo sapiens
atagtagtgccatat

SEQ ID NO: 2118705 - DNA, 15 bp, Homo sapiens
tagtagtgccatatt

SEQ ID NO: 2118706 - DNA, 15 bp, Homo sapiens
agtagtgccatattt

SEQ ID NO: 2118707 - DNA, 15 bp, Homo sapiens
gtagtgccatatttg

SEQ ID NO: 2118708 - DNA, 15 bp, Homo sapiens
tagtgccatatttgc

SEQ ID NO: 2118709 - DNA, 15 bp, Homo sapiens
agtgccatatttgca

SEQ ID NO: 2118710 - DNA, 15 bp, Homo sapiens
gtgccatatttgcat

SEQ ID NO: 2118711 - DNA, 15 bp, Homo sapiens
tgccatatttgcatt

SEQ ID NO: 2118712 - DNA, 15 bp, Homo sapiens
gccatatttgcattt

SEQ ID NO: 2118713 - DNA, 15 bp, Homo sapiens
ccatatttgcatttt

SEQ ID NO: 2118714 - DNA, 15 bp, Homo sapiens
catatttgcatttta

SEQ ID NO: 2118715 - DNA, 15 bp, Homo sapiens
atatttgcattttag

SEQ ID NO: 2118716 - DNA, 15 bp, Homo sapiens
tatttgcattttagt

SEQ ID NO: 2118717 - DNA, 15 bp, Homo sapiens
atttgcattttagtt

SEQ ID NO: 2118718 - DNA, 15 bp, Homo sapiens
tttgcattttagtta

SEQ ID NO: 2118719 - DNA, 15 bp, Homo sapiens
ttgcattttagttat

SEQ ID NO: 2118720 - DNA, 15 bp, Homo sapiens
tgcattttagttatc

SEQ ID NO: 2118721 - DNA, 15 bp, Homo sapiens
gcattttagttatct

SEQ ID NO: 2118722 - DNA, 15 bp, Homo sapiens
cattttagttatcta

SEQ ID NO: 2118723 - DNA, 15 bp, Homo sapiens
attttagttatctat

SEQ ID NO: 2118724 - DNA, 15 bp, Homo sapiens
ttttagttatctatt

SEQ ID NO: 2118725 - DNA, 15 bp, Homo sapiens
tttagttatctatta

SEQ ID NO: 2118726 - DNA, 15 bp, Homo sapiens
ttagttatctattaa

SEQ ID NO: 2118727 - DNA, 15 bp, Homo sapiens
tagttatctattaac

SEQ ID NO: 2118728 - DNA, 15 bp, Homo sapiens
agttatctattaact

SEQ ID NO: 2118729 - DNA, 15 bp, Homo sapiens
gttatctattaacta

SEQ ID NO: 2118730 - DNA, 15 bp, Homo sapiens
ttatctattaactac

SEQ ID NO: 2118731 - DNA, 15 bp, Homo sapiens
tatctattaactact

SEQ ID NO: 2118732 - DNA, 15 bp, Homo sapiens
atctattaactacta

SEQ ID NO: 2118733 - DNA, 15 bp, Homo sapiens
tctattaactactaa

SEQ ID NO: 2118734 - DNA, 15 bp, Homo sapiens
ctattaactactaat

SEQ ID NO: 2118735 - DNA, 15 bp, Homo sapiens
tattaactactaatt

SEQ ID NO: 2118736 - DNA, 15 bp, Homo sapiens
attaactactaattt

SEQ ID NO: 2118737 - DNA, 15 bp, Homo sapiens
ttaactactaatttg

SEQ ID NO: 2118738 - DNA, 15 bp, Homo sapiens
taactactaatttgt

SEQ ID NO: 2118739 - DNA, 15 bp, Homo sapiens
aactactaatttgta

SEQ ID NO: 2118740 - DNA, 15 bp, Homo sapiens
actactaatttgtac

SEQ ID NO: 2118741 - DNA, 15 bp, Homo sapiens
ctactaatttgtaca

SEQ ID NO: 2118742 - DNA, 15 bp, Homo sapiens
tactaatttgtacat

SEQ ID NO: 2118743 - DNA, 15 bp, Homo sapiens
actaatttgtacatc

SEQ ID NO: 2118744 - DNA, 15 bp, Homo sapiens
ctaatttgtacatct

SEQ ID NO: 2118745 - DNA, 15 bp, Homo sapiens
taatttgtacatctg

SEQ ID NO: 2118746 - DNA, 15 bp, Homo sapiens
aatttgtacatctgc

SEQ ID NO: 2118747 - DNA, 15 bp, Homo sapiens
atttgtacatctgct

SEQ ID NO: 2118748 - DNA, 15 bp, Homo sapiens
tttgtacatctgcta

SEQ ID NO: 2118749 - DNA, 15 bp, Homo sapiens
ttgtacatctgctat

SEQ ID NO: 2118750 - DNA, 15 bp, Homo sapiens
tgtacatctgctatg

SEQ ID NO: 2118751 - DNA, 15 bp, Homo sapiens
gtacatctgctatgt

SEQ ID NO: 2118752 - DNA, 15 bp, Homo sapiens
tacatctgctatgtt

SEQ ID NO: 2118753 - DNA, 15 bp, Homo sapiens
acatctgctatgttt

SEQ ID NO: 2118754 - DNA, 15 bp, Homo sapiens
catctgctatgtttt

SEQ ID NO: 2118755 - DNA, 15 bp, Homo sapiens
atctgctatgtttta

SEQ ID NO: 2118756 - DNA, 15 bp, Homo sapiens
tctgctatgttttat

SEQ ID NO: 2118757 - DNA, 15 bp, Homo sapiens
ctgctatgttttata

SEQ ID NO: 2118758 - DNA, 15 bp, Homo sapiens
tgctatgttttatag

SEQ ID NO: 2118759 - DNA, 15 bp, Homo sapiens
gctatgttttatagt

SEQ ID NO: 2118760 - DNA, 15 bp, Homo sapiens
ctatgttttatagtt

SEQ ID NO: 2118761 - DNA, 15 bp, Homo sapiens
tatgttttatagttg

SEQ ID NO: 2118762 - DNA, 15 bp, Homo sapiens
atgttttatagttgt

SEQ ID NO: 2118763 - DNA, 15 bp, Homo sapiens
tgttttatagttgta

SEQ ID NO: 2118764 - DNA, 15 bp, Homo sapiens
gttttatagttgtat

SEQ ID NO: 2118765 - DNA, 15 bp, Homo sapiens
ttttatagttgtatt

SEQ ID NO: 2118766 - DNA, 15 bp, Homo sapiens
tttatagttgtatta

SEQ ID NO: 2118767 - DNA, 15 bp, Homo sapiens
ttatagttgtattat

SEQ ID NO: 2118768 - DNA, 15 bp, Homo sapiens
tatagttgtattata

SEQ ID NO: 2118769 - DNA, 15 bp, Homo sapiens
atagttgtattatag

SEQ ID NO: 2118770 - DNA, 15 bp, Homo sapiens
tagttgtattataga

SEQ ID NO: 2118771 - DNA, 15 bp, Homo sapiens
agttgtattatagat

SEQ ID NO: 2118772 - DNA, 15 bp, Homo sapiens
gttgtattatagatg

SEQ ID NO: 2118773 - DNA, 15 bp, Homo sapiens
ttgtattatagatgt

SEQ ID NO: 2118774 - DNA, 15 bp, Homo sapiens
tgtattatagatgta

SEQ ID NO: 2118775 - DNA, 15 bp, Homo sapiens
gtattatagatgtag

SEQ ID NO: 2118776 - DNA, 15 bp, Homo sapiens
tattatagatgtagg

SEQ ID NO: 2118777 - DNA, 15 bp, Homo sapiens
attatagatgtaggc

SEQ ID NO: 2118778 - DNA, 15 bp, Homo sapiens
ttatagatgtaggca

SEQ ID NO: 2118779 - DNA, 15 bp, Homo sapiens
tatagatgtaggcaa

SEQ ID NO: 2118780 - DNA, 15 bp, Homo sapiens
atagatgtaggcaaa

SEQ ID NO: 2118781 - DNA, 15 bp, Homo sapiens
tagatgtaggcaaac

SEQ ID NO: 2118782 - DNA, 15 bp, Homo sapiens
agatgtaggcaaaca

SEQ ID NO: 2118783 - DNA, 15 bp, Homo sapiens
gatgtaggcaaacag

SEQ ID NO: 2118784 - DNA, 15 bp, Homo sapiens
atgtaggcaaacaga

SEQ ID NO: 2118785 - DNA, 15 bp, Homo sapiens
tgtaggcaaacagat

SEQ ID NO: 2118786 - DNA, 15 bp, Homo sapiens
gtaggcaaacagatt

SEQ ID NO: 2118787 - DNA, 15 bp, Homo sapiens
taggcaaacagattt

SEQ ID NO: 2118788 - DNA, 15 bp, Homo sapiens
aggcaaacagatttc

SEQ ID NO: 2118789 - DNA, 15 bp, Homo sapiens
ggcaaacagatttca

SEQ ID NO: 2118790 - DNA, 15 bp, Homo sapiens
gcaaacagatttcat

SEQ ID NO: 2118791 - DNA, 15 bp, Homo sapiens
caaacagatttcatt

SEQ ID NO: 2118792 - DNA, 15 bp, Homo sapiens
aaacagatttcattc

SEQ ID NO: 2118793 - DNA, 15 bp, Homo sapiens
aacagatttcattcc

SEQ ID NO: 2118794 - DNA, 15 bp, Homo sapiens
acagatttcattcca

SEQ ID NO: 2118795 - DNA, 15 bp, Homo sapiens
cagatttcattccag

SEQ ID NO: 2118796 - DNA, 15 bp, Homo sapiens
agatttcattccagg

SEQ ID NO: 2118797 - DNA, 15 bp, Homo sapiens
gatttcattccaggt

SEQ ID NO: 2118798 - DNA, 15 bp, Homo sapiens
atttcattccaggtt

SEQ ID NO: 2118799 - DNA, 15 bp, Homo sapiens
tttcattccaggttt

SEQ ID NO: 2118800 - DNA, 15 bp, Homo sapiens
ttcattccaggtttg

SEQ ID NO: 2118801 - DNA, 15 bp, Homo sapiens
tcattccaggtttgt

SEQ ID NO: 2118802 - DNA, 15 bp, Homo sapiens
cattccaggtttgtt

SEQ ID NO: 2118803 - DNA, 15 bp, Homo sapiens
attccaggtttgttc

SEQ ID NO: 2118804 - DNA, 15 bp, Homo sapiens
ttccaggtttgttca

SEQ ID NO: 2118805 - DNA, 15 bp, Homo sapiens
tccaggtttgttcat

SEQ ID NO: 2118806 - DNA, 15 bp, Homo sapiens
ccaggtttgttcata

SEQ ID NO: 2118807 - DNA, 15 bp, Homo sapiens
caggtttgttcatac

SEQ ID NO: 2118808 - DNA, 15 bp, Homo sapiens
aggtttgttcataca

SEQ ID NO: 2118809 - DNA, 15 bp, Homo sapiens
ggtttgttcatacac

SEQ ID NO: 2118810 - DNA, 15 bp, Homo sapiens
gtttgttcatacact

SEQ ID NO: 2118811 - DNA, 15 bp, Homo sapiens
tttgttcatacactt

SEQ ID NO: 2118812 - DNA, 15 bp, Homo sapiens
ttgttcatacacttt

SEQ ID NO: 2118813 - DNA, 15 bp, Homo sapiens
tgttcatacacttta

SEQ ID NO: 2118814 - DNA, 15 bp, Homo sapiens
gttcatacactttaa

SEQ ID NO: 2118815 - DNA, 15 bp, Homo sapiens
ttcatacactttaac

SEQ ID NO: 2118816 - DNA, 15 bp, Homo sapiens
tcatacactttaact

SEQ ID NO: 2118817 - DNA, 15 bp, Homo sapiens
catacactttaactt

SEQ ID NO: 2118818 - DNA, 15 bp, Homo sapiens
atacactttaactta

SEQ ID NO: 2118819 - DNA, 15 bp, Homo sapiens
tacactttaacttaa

SEQ ID NO: 2118820 - DNA, 15 bp, Homo sapiens
acactttaacttaac

SEQ ID NO: 2118821 - DNA, 15 bp, Homo sapiens
cactttaacttaaca

SEQ ID NO: 2118822 - DNA, 15 bp, Homo sapiens
actttaacttaacaa

SEQ ID NO: 2118823 - DNA, 15 bp, Homo sapiens
ctttaacttaacaat

SEQ ID NO: 2118824 - DNA, 15 bp, Homo sapiens
tttaacttaacaatt

SEQ ID NO: 2118825 - DNA, 15 bp, Homo sapiens
ttaacttaacaatta

SEQ ID NO: 2118826 - DNA, 15 bp, Homo sapiens
taacttaacaattat

SEQ ID NO: 2118827 - DNA, 15 bp, Homo sapiens
aacttaacaattatt

SEQ ID NO: 2118828 - DNA, 15 bp, Homo sapiens
acttaacaattattc

SEQ ID NO: 2118829 - DNA, 15 bp, Homo sapiens
cttaacaattattcc

SEQ ID NO: 2118830 - DNA, 15 bp, Homo sapiens
ttaacaattattccc

SEQ ID NO: 2118831 - DNA, 15 bp, Homo sapiens
taacaattattccca

SEQ ID NO: 2118832 - DNA, 15 bp, Homo sapiens
aacaattattcccat

SEQ ID NO: 2118833 - DNA, 15 bp, Homo sapiens
acaattattcccata

SEQ ID NO: 2118834 - DNA, 15 bp, Homo sapiens
caattattcccataa

SEQ ID NO: 2118835 - DNA, 15 bp, Homo sapiens
aattattcccataaa

SEQ ID NO: 2118836 - DNA, 15 bp, Homo sapiens
attattcccataaac

SEQ ID NO: 2118837 - DNA, 15 bp, Homo sapiens
ttattcccataaacc

SEQ ID NO: 2118838 - DNA, 15 bp, Homo sapiens
tattcccataaacct

SEQ ID NO: 2118839 - DNA, 15 bp, Homo sapiens
attcccataaaccta

SEQ ID NO: 2118840 - DNA, 15 bp, Homo sapiens
ttcccataaacctaa

SEQ ID NO: 2118841 - DNA, 15 bp, Homo sapiens
tcccataaacctaaa

SEQ ID NO: 2118842 - DNA, 15 bp, Homo sapiens
cccataaacctaaat

SEQ ID NO: 2118843 - DNA, 15 bp, Homo sapiens
ccataaacctaaata

SEQ ID NO: 2118844 - DNA, 15 bp, Homo sapiens
cataaacctaaatag

SEQ ID NO: 2118845 - DNA, 15 bp, Homo sapiens
ataaacctaaatagt

SEQ ID NO: 2118846 - DNA, 15 bp, Homo sapiens
taaacctaaatagta

SEQ ID NO: 2118847 - DNA, 15 bp, Homo sapiens
aaacctaaatagtac

SEQ ID NO: 2118848 - DNA, 15 bp, Homo sapiens
aacctaaatagtaca

SEQ ID NO: 2118849 - DNA, 15 bp, Homo sapiens
acctaaatagtacat

SEQ ID NO: 2118850 - DNA, 15 bp, Homo sapiens
cctaaatagtacata

SEQ ID NO: 2118851 - DNA, 15 bp, Homo sapiens
ctaaatagtacataa

SEQ ID NO: 2118852 - DNA, 15 bp, Homo sapiens
taaatagtacataat

SEQ ID NO: 2118853 - DNA, 15 bp, Homo sapiens
aaatagtacataata

SEQ ID NO: 2118854 - DNA, 15 bp, Homo sapiens
aatagtacataataa

SEQ ID NO: 2118855 - DNA, 15 bp, Homo sapiens
atagtacataataat

SEQ ID NO: 2118856 - DNA, 15 bp, Homo sapiens
tagtacataataata

SEQ ID NO: 2118857 - DNA, 15 bp, Homo sapiens
agtacataataatat

SEQ ID NO: 2118858 - DNA, 15 bp, Homo sapiens
gtacataataatatt

SEQ ID NO: 2118859 - DNA, 15 bp, Homo sapiens
tacataataatattt

SEQ ID NO: 2118860 - DNA, 15 bp, Homo sapiens
acataataatatttt

SEQ ID NO: 2118861 - DNA, 15 bp, Homo sapiens
cataataatattttt

SEQ ID NO: 2118862 - DNA, 15 bp, Homo sapiens
ataataatatttttc

SEQ ID NO: 2118863 - DNA, 15 bp, Homo sapiens
taataatatttttct

SEQ ID NO: 2118864 - DNA, 15 bp, Homo sapiens
aataatatttttctt

SEQ ID NO: 2118865 - DNA, 15 bp, Homo sapiens
ataatatttttcttt

SEQ ID NO: 2118866 - DNA, 15 bp, Homo sapiens
taatatttttctttt

SEQ ID NO: 2118867 - DNA, 15 bp, Homo sapiens
aatatttttctttta

SEQ ID NO: 2118868 - DNA, 15 bp, Homo sapiens
atatttttcttttac

SEQ ID NO: 2118869 - DNA, 15 bp, Homo sapiens
tatttttcttttaca

SEQ ID NO: 2118870 - DNA, 15 bp, Homo sapiens
atttttcttttacag

SEQ ID NO: 2118871 - DNA, 15 bp, Homo sapiens
tttttcttttacaga

SEQ ID NO: 2118872 - DNA, 15 bp, Homo sapiens
ttttcttttacagaa

SEQ ID NO: 2118873 - DNA, 15 bp, Homo sapiens
tttcttttacagaaa

SEQ ID NO: 2118874 - DNA, 15 bp, Homo sapiens
ttcttttacagaaaa

SEQ ID NO: 2118875 - DNA, 15 bp, Homo sapiens
tcttttacagaaaac

SEQ ID NO: 2118876 - DNA, 15 bp, Homo sapiens
cttttacagaaaacg

SEQ ID NO: 2118877 - DNA, 15 bp, Homo sapiens
ttttacagaaaacgt

SEQ ID NO: 2118878 - DNA, 15 bp, Homo sapiens
tttacagaaaacgtt

SEQ ID NO: 2118879 - DNA, 15 bp, Homo sapiens
ttacagaaaacgttt

SEQ ID NO: 2118880 - DNA, 15 bp, Homo sapiens
tacagaaaacgttta

SEQ ID NO: 2118881 - DNA, 15 bp, Homo sapiens
acagaaaacgtttaa

SEQ ID NO: 2118882 - DNA, 15 bp, Homo sapiens
cagaaaacgtttaat

SEQ ID NO: 2118883 - DNA, 15 bp, Homo sapiens
agaaaacgtttaatc

SEQ ID NO: 2118884 - DNA, 15 bp, Homo sapiens
gaaaacgtttaatca

SEQ ID NO: 2118885 - DNA, 15 bp, Homo sapiens
aaaacgtttaatcaa

SEQ ID NO: 2118886 - DNA, 15 bp, Homo sapiens
aaacgtttaatcaaa

SEQ ID NO: 2118887 - DNA, 15 bp, Homo sapiens
aacgtttaatcaaat

SEQ ID NO: 2118888 - DNA, 15 bp, Homo sapiens
acgtttaatcaaata

SEQ ID NO: 2118889 - DNA, 15 bp, Homo sapiens
cgtttaatcaaatat

SEQ ID NO: 2118890 - DNA, 15 bp, Homo sapiens
gtttaatcaaatata

SEQ ID NO: 2118891 - DNA, 15 bp, Homo sapiens
tttaatcaaatatag

SEQ ID NO: 2118892 - DNA, 15 bp, Homo sapiens
ttaatcaaatatagc

SEQ ID NO: 2118893 - DNA, 15 bp, Homo sapiens
taatcaaatatagca

SEQ ID NO: 2118894 - DNA, 15 bp, Homo sapiens
aatcaaatatagcaa

SEQ ID NO: 2118895 - DNA, 15 bp, Homo sapiens
atcaaatatagcaaa

SEQ ID NO: 2118896 - DNA, 15 bp, Homo sapiens
tcaaatatagcaaaa

SEQ ID NO: 2118897 - DNA, 15 bp, Homo sapiens
caaatatagcaaaat

SEQ ID NO: 2118898 - DNA, 15 bp, Homo sapiens
aaatatagcaaaata

SEQ ID NO: 2118899 - DNA, 15 bp, Homo sapiens
aatatagcaaaatat

SEQ ID NO: 2118900 - DNA, 15 bp, Homo sapiens
atatagcaaaatatt

SEQ ID NO: 2118901 - DNA, 15 bp, Homo sapiens
tatagcaaaatatta

SEQ ID NO: 2118902 - DNA, 15 bp, Homo sapiens
atagcaaaatattaa

SEQ ID NO: 2118903 - DNA, 15 bp, Homo sapiens
tagcaaaatattaat

SEQ ID NO: 2118904 - DNA, 15 bp, Homo sapiens
agcaaaatattaatt

SEQ ID NO: 2118905 - DNA, 15 bp, Homo sapiens
gcaaaatattaattg

SEQ ID NO: 2118906 - DNA, 15 bp, Homo sapiens
caaaatattaattgt

SEQ ID NO: 2118907 - DNA, 15 bp, Homo sapiens
aaaatattaattgta

SEQ ID NO: 2118908 - DNA, 15 bp, Homo sapiens
aaatattaattgtag

SEQ ID NO: 2118909 - DNA, 15 bp, Homo sapiens
aatattaattgtaga

SEQ ID NO: 2118910 - DNA, 15 bp, Homo sapiens
atattaattgtagaa

SEQ ID NO: 2118911 - DNA, 15 bp, Homo sapiens
tattaattgtagaat

SEQ ID NO: 2118912 - DNA, 15 bp, Homo sapiens
attaattgtagaatc

SEQ ID NO: 2118913 - DNA, 15 bp, Homo sapiens
ttaattgtagaatct

SEQ ID NO: 2118914 - DNA, 15 bp, Homo sapiens
taattgtagaatcta

SEQ ID NO: 2118915 - DNA, 15 bp, Homo sapiens
aattgtagaatctaa

SEQ ID NO: 2118916 - DNA, 15 bp, Homo sapiens
attgtagaatctaag

SEQ ID NO: 2118917 - DNA, 15 bp, Homo sapiens
ttgtagaatctaagc

SEQ ID NO: 2118918 - DNA, 15 bp, Homo sapiens
tgtagaatctaagca

SEQ ID NO: 2118919 - DNA, 15 bp, Homo sapiens
gtagaatctaagcag

SEQ ID NO: 2118920 - DNA, 15 bp, Homo sapiens
tagaatctaagcagt

SEQ ID NO: 2118921 - DNA, 15 bp, Homo sapiens
agaatctaagcagtg

SEQ ID NO: 2118922 - DNA, 15 bp, Homo sapiens
gaatctaagcagtga

SEQ ID NO: 2118923 - DNA, 15 bp, Homo sapiens
aatctaagcagtgat

SEQ ID NO: 2118924 - DNA, 15 bp, Homo sapiens
atctaagcagtgatt

SEQ ID NO: 2118925 - DNA, 15 bp, Homo sapiens
tctaagcagtgatta

SEQ ID NO: 2118926 - DNA, 15 bp, Homo sapiens
ctaagcagtgattat

SEQ ID NO: 2118927 - DNA, 15 bp, Homo sapiens
taagcagtgattatg

SEQ ID NO: 2118928 - DNA, 15 bp, Homo sapiens
aagcagtgattatgt

SEQ ID NO: 2118929 - DNA, 15 bp, Homo sapiens
agcagtgattatgta

SEQ ID NO: 2118930 - DNA, 15 bp, Homo sapiens
gcagtgattatgtag

SEQ ID NO: 2118931 - DNA, 15 bp, Homo sapiens
cagtgattatgtagg

SEQ ID NO: 2118932 - DNA, 15 bp, Homo sapiens
agtgattatgtaggt

SEQ ID NO: 2118933 - DNA, 15 bp, Homo sapiens
gtgattatgtaggtg

SEQ ID NO: 2118934 - DNA, 15 bp, Homo sapiens
tgattatgtaggtgc

SEQ ID NO: 2118935 - DNA, 15 bp, Homo sapiens
gattatgtaggtgca

SEQ ID NO: 2118936 - DNA, 15 bp, Homo sapiens
attatgtaggtgcac

SEQ ID NO: 2118937 - DNA, 15 bp, Homo sapiens
ttatgtaggtgcaca

SEQ ID NO: 2118938 - DNA, 15 bp, Homo sapiens
tatgtaggtgcacac

SEQ ID NO: 2118939 - DNA, 15 bp, Homo sapiens
atgtaggtgcacact

SEQ ID NO: 2118940 - DNA, 15 bp, Homo sapiens
tgtaggtgcacactg

SEQ ID NO: 2118941 - DNA, 15 bp, Homo sapiens
gtaggtgcacactga

SEQ ID NO: 2118942 - DNA, 15 bp, Homo sapiens
taggtgcacactgaa

SEQ ID NO: 2118943 - DNA, 15 bp, Homo sapiens
aggtgcacactgaat

SEQ ID NO: 2118944 - DNA, 15 bp, Homo sapiens
ggtgcacactgaata

SEQ ID NO: 2118945 - DNA, 15 bp, Homo sapiens
gtgcacactgaataa

SEQ ID NO: 2118946 - DNA, 15 bp, Homo sapiens
tgcacactgaataat

SEQ ID NO: 2118947 - DNA, 15 bp, Homo sapiens
gcacactgaataatt

SEQ ID NO: 2118948 - DNA, 15 bp, Homo sapiens
cacactgaataattc

SEQ ID NO: 2118949 - DNA, 15 bp, Homo sapiens
acactgaataattct

SEQ ID NO: 2118950 - DNA, 15 bp, Homo sapiens
cactgaataattctt

SEQ ID NO: 2118951 - DNA, 15 bp, Homo sapiens
actgaataattcttt

SEQ ID NO: 2118952 - DNA, 15 bp, Homo sapiens
ctgaataattctttt

SEQ ID NO: 2118953 - DNA, 15 bp, Homo sapiens
tgaataattcttttc

SEQ ID NO: 2118954 - DNA, 15 bp, Homo sapiens
gaataattcttttct

SEQ ID NO: 2118955 - DNA, 15 bp, Homo sapiens
aataattcttttctt

SEQ ID NO: 2118956 - DNA, 15 bp, Homo sapiens
ataattcttttcttg

SEQ ID NO: 2118957 - DNA, 15 bp, Homo sapiens
taattcttttcttga

SEQ ID NO: 2118958 - DNA, 15 bp, Homo sapiens
aattcttttcttgag

SEQ ID NO: 2118959 - DNA, 15 bp, Homo sapiens
attcttttcttgaga

SEQ ID NO: 2118960 - DNA, 15 bp, Homo sapiens
ttcttttcttgagag

SEQ ID NO: 2118961 - DNA, 15 bp, Homo sapiens
tcttttcttgagaga

SEQ ID NO: 2118962 - DNA, 15 bp, Homo sapiens
cttttcttgagagaa

SEQ ID NO: 2118963 - DNA, 15 bp, Homo sapiens
ttttcttgagagaaa

SEQ ID NO: 2118964 - DNA, 15 bp, Homo sapiens
tttcttgagagaaaa

SEQ ID NO: 2118965 - DNA, 15 bp, Homo sapiens
ttcttgagagaaaac

SEQ ID NO: 2118966 - DNA, 15 bp, Homo sapiens
tcttgagagaaaacc

SEQ ID NO: 2118967 - DNA, 15 bp, Homo sapiens
cttgagagaaaacct

SEQ ID NO: 2118968 - DNA, 15 bp, Homo sapiens
ttgagagaaaacctc

SEQ ID NO: 2118969 - DNA, 15 bp, Homo sapiens
tgagagaaaacctcc

SEQ ID NO: 2118970 - DNA, 15 bp, Homo sapiens
gagagaaaacctccc

SEQ ID NO: 2118971 - DNA, 15 bp, Homo sapiens
agagaaaacctccct

SEQ ID NO: 2118972 - DNA, 15 bp, Homo sapiens
gagaaaacctcccta

SEQ ID NO: 2118973 - DNA, 15 bp, Homo sapiens
agaaaacctccctac

SEQ ID NO: 2118974 - DNA, 15 bp, Homo sapiens
gaaaacctccctact

SEQ ID NO: 2118975 - DNA, 15 bp, Homo sapiens
aaaacctccctacta

SEQ ID NO: 2118976 - DNA, 15 bp, Homo sapiens
aaacctccctactat

SEQ ID NO: 2118977 - DNA, 15 bp, Homo sapiens
aacctccctactatc

SEQ ID NO: 2118978 - DNA, 15 bp, Homo sapiens
acctccctactatca

SEQ ID NO: 2118979 - DNA, 15 bp, Homo sapiens
cctccctactatcaa

SEQ ID NO: 2118980 - DNA, 15 bp, Homo sapiens
ctccctactatcaaa

SEQ ID NO: 2118981 - DNA, 15 bp, Homo sapiens
tccctactatcaaac

SEQ ID NO: 2118982 - DNA, 15 bp, Homo sapiens
ccctactatcaaact

SEQ ID NO: 2118983 - DNA, 15 bp, Homo sapiens
cctactatcaaactt

SEQ ID NO: 2118984 - DNA, 15 bp, Homo sapiens
ctactatcaaactta

SEQ ID NO: 2118985 - DNA, 15 bp, Homo sapiens
tactatcaaacttat

SEQ ID NO: 2118986 - DNA, 15 bp, Homo sapiens
actatcaaacttatt

SEQ ID NO: 2118987 - DNA, 15 bp, Homo sapiens
ctatcaaacttatta

SEQ ID NO: 2118988 - DNA, 15 bp, Homo sapiens
tatcaaacttattat

SEQ ID NO: 2118989 - DNA, 15 bp, Homo sapiens
atcaaacttattata

SEQ ID NO: 2118990 - DNA, 15 bp, Homo sapiens
tcaaacttattatac

SEQ ID NO: 2118991 - DNA, 15 bp, Homo sapiens
caaacttattataca

SEQ ID NO: 2118992 - DNA, 15 bp, Homo sapiens
aaacttattatacag

SEQ ID NO: 2118993 - DNA, 15 bp, Homo sapiens
aacttattatacaga

SEQ ID NO: 2118994 - DNA, 15 bp, Homo sapiens
acttattatacagac

SEQ ID NO: 2118995 - DNA, 15 bp, Homo sapiens
cttattatacagact

SEQ ID NO: 2118996 - DNA, 15 bp, Homo sapiens
ttattatacagactt

SEQ ID NO: 2118997 - DNA, 15 bp, Homo sapiens
tattatacagacttg

SEQ ID NO: 2118998 - DNA, 15 bp, Homo sapiens
attatacagacttga

SEQ ID NO: 2118999 - DNA, 15 bp, Homo sapiens
ttatacagacttgag

SEQ ID NO: 2119000 - DNA, 15 bp, Homo sapiens
tatacagacttgaga

SEQ ID NO: 2119001 - DNA, 15 bp, Homo sapiens
atacagacttgagaa

SEQ ID NO: 2119002 - DNA, 15 bp, Homo sapiens
tacagacttgagaaa

SEQ ID NO: 2119003 - DNA, 15 bp, Homo sapiens
acagacttgagaaac

SEQ ID NO: 2119004 - DNA, 15 bp, Homo sapiens
cagacttgagaaaca

SEQ ID NO: 2119005 - DNA, 15 bp, Homo sapiens
agacttgagaaacac

SEQ ID NO: 2119006 - DNA, 15 bp, Homo sapiens
gacttgagaaacact

SEQ ID NO: 2119007 - DNA, 15 bp, Homo sapiens
acttgagaaacactg

SEQ ID NO: 2119008 - DNA, 15 bp, Homo sapiens
cttgagaaacactgt

SEQ ID NO: 2119009 - DNA, 15 bp, Homo sapiens
ttgagaaacactgtc

SEQ ID NO: 2119010 - DNA, 15 bp, Homo sapiens
tgagaaacactgtct

SEQ ID NO: 2119011 - DNA, 15 bp, Homo sapiens
gagaaacactgtctc

SEQ ID NO: 2119012 - DNA, 15 bp, Homo sapiens
agaaacactgtctca

SEQ ID NO: 2119013 - DNA, 15 bp, Homo sapiens
gaaacactgtctcaa

SEQ ID NO: 2119014 - DNA, 15 bp, Homo sapiens
aaacactgtctcaaa

SEQ ID NO: 2119015 - DNA, 15 bp, Homo sapiens
aacactgtctcaaac

SEQ ID NO: 2119016 - DNA, 15 bp, Homo sapiens
acactgtctcaaact

SEQ ID NO: 2119017 - DNA, 15 bp, Homo sapiens
cactgtctcaaacta

SEQ ID NO: 2119018 - DNA, 15 bp, Homo sapiens
actgtctcaaactaa

SEQ ID NO: 2119019 - DNA, 15 bp, Homo sapiens
ctgtctcaaactaat

SEQ ID NO: 2119020 - DNA, 15 bp, Homo sapiens
tgtctcaaactaata

SEQ ID NO: 2119021 - DNA, 15 bp, Homo sapiens
gtctcaaactaatat

SEQ ID NO: 2119022 - DNA, 15 bp, Homo sapiens
tctcaaactaatatc

SEQ ID NO: 2119023 - DNA, 15 bp, Homo sapiens
ctcaaactaatatct

SEQ ID NO: 2119024 - DNA, 15 bp, Homo sapiens
tcaaactaatatcta

SEQ ID NO: 2119025 - DNA, 15 bp, Homo sapiens
caaactaatatctaa

SEQ ID NO: 2119026 - DNA, 15 bp, Homo sapiens
aaactaatatctaat

SEQ ID NO: 2119027 - DNA, 15 bp, Homo sapiens
aactaatatctaata

SEQ ID NO: 2119028 - DNA, 15 bp, Homo sapiens
actaatatctaatat

SEQ ID NO: 2119029 - DNA, 15 bp, Homo sapiens
ctaatatctaatata

SEQ ID NO: 2119030 - DNA, 15 bp, Homo sapiens
taatatctaatataa

SEQ ID NO: 2119031 - DNA, 15 bp, Homo sapiens
aatatctaatataaa

SEQ ID NO: 2119032 - DNA, 15 bp, Homo sapiens
atatctaatataaaa

SEQ ID NO: 2119033 - DNA, 15 bp, Homo sapiens
tatctaatataaaat

SEQ ID NO: 2119034 - DNA, 15 bp, Homo sapiens
atctaatataaaata

SEQ ID NO: 2119035 - DNA, 15 bp, Homo sapiens
tctaatataaaatat

SEQ ID NO: 2119036 - DNA, 15 bp, Homo sapiens
ctaatataaaatatt

SEQ ID NO: 2119037 - DNA, 15 bp, Homo sapiens
taatataaaatatta

SEQ ID NO: 2119038 - DNA, 15 bp, Homo sapiens
aatataaaatattaa

SEQ ID NO: 2119039 - DNA, 15 bp, Homo sapiens
atataaaatattaaa

SEQ ID NO: 2119040 - DNA, 15 bp, Homo sapiens
tataaaatattaaaa

SEQ ID NO: 2119041 - DNA, 15 bp, Homo sapiens
taaaatattaaaatt

SEQ ID NO: 2119042 - DNA, 15 bp, Homo sapiens
aaaatattaaaatta

SEQ ID NO: 2119043 - DNA, 15 bp, Homo sapiens
aaatattaaaattat

SEQ ID NO: 2119044 - DNA, 15 bp, Homo sapiens
aatattaaaattata

SEQ ID NO: 2119045 - DNA, 15 bp, Homo sapiens
atattaaaattatac

SEQ ID NO: 2119046 - DNA, 15 bp, Homo sapiens
tattaaaattatact

SEQ ID NO: 2119047 - DNA, 15 bp, Homo sapiens
attaaaattatactc

SEQ ID NO: 2119048 - DNA, 15 bp, Homo sapiens
ttaaaattatactca

SEQ ID NO: 2119049 - DNA, 15 bp, Homo sapiens
taaaattatactcaa

SEQ ID NO: 2119050 - DNA, 15 bp, Homo sapiens
aaaattatactcaac

SEQ ID NO: 2119051 - DNA, 15 bp, Homo sapiens
aaattatactcaaca

SEQ ID NO: 2119052 - DNA, 15 bp, Homo sapiens
aattatactcaacat

SEQ ID NO: 2119053 - DNA, 15 bp, Homo sapiens
attatactcaacata

SEQ ID NO: 2119054 - DNA, 15 bp, Homo sapiens
ttatactcaacataa

SEQ ID NO: 2119055 - DNA, 15 bp, Homo sapiens
tatactcaacataat

SEQ ID NO: 2119056 - DNA, 15 bp, Homo sapiens
atactcaacataatt

SEQ ID NO: 2119057 - DNA, 15 bp, Homo sapiens
tactcaacataattt

SEQ ID NO: 2119058 - DNA, 15 bp, Homo sapiens
actcaacataatttc

SEQ ID NO: 2119059 - DNA, 15 bp, Homo sapiens
ctcaacataatttca

SEQ ID NO: 2119060 - DNA, 15 bp, Homo sapiens
tcaacataatttcat

SEQ ID NO: 2119061 - DNA, 15 bp, Homo sapiens
caacataatttcatg

SEQ ID NO: 2119062 - DNA, 15 bp, Homo sapiens
aacataatttcatgt

SEQ ID NO: 2119063 - DNA, 15 bp, Homo sapiens
acataatttcatgtt

SEQ ID NO: 2119064 - DNA, 15 bp, Homo sapiens
cataatttcatgtta

SEQ ID NO: 2119065 - DNA, 15 bp, Homo sapiens
ataatttcatgttat

SEQ ID NO: 2119066 - DNA, 15 bp, Homo sapiens
taatttcatgttatt

SEQ ID NO: 2119067 - DNA, 15 bp, Homo sapiens
aatttcatgttattt

SEQ ID NO: 2119068 - DNA, 15 bp, Homo sapiens
atttcatgttatttt

SEQ ID NO: 2119069 - DNA, 15 bp, Homo sapiens
tttcatgttatttta

SEQ ID NO: 2119070 - DNA, 15 bp, Homo sapiens
ttcatgttattttaa

SEQ ID NO: 2119071 - DNA, 15 bp, Homo sapiens
tcatgttattttaaa

SEQ ID NO: 2119072 - DNA, 15 bp, Homo sapiens
catgttattttaaat

SEQ ID NO: 2119073 - DNA, 15 bp, Homo sapiens
atgttattttaaatt

SEQ ID NO: 2119074 - DNA, 15 bp, Homo sapiens
tgttattttaaattg

SEQ ID NO: 2119075 - DNA, 15 bp, Homo sapiens
gttattttaaattgc

SEQ ID NO: 2119076 - DNA, 15 bp, Homo sapiens
ttattttaaattgct

SEQ ID NO: 2119077 - DNA, 15 bp, Homo sapiens
tattttaaattgctg

SEQ ID NO: 2119078 - DNA, 15 bp, Homo sapiens
attttaaattgctga

SEQ ID NO: 2119079 - DNA, 15 bp, Homo sapiens
ttttaaattgctgat

SEQ ID NO: 2119080 - DNA, 15 bp, Homo sapiens
tttaaattgctgatt

SEQ ID NO: 2119081 - DNA, 15 bp, Homo sapiens
ttaaattgctgatta

SEQ ID NO: 2119082 - DNA, 15 bp, Homo sapiens
taaattgctgattaa

SEQ ID NO: 2119083 - DNA, 15 bp, Homo sapiens
aaattgctgattaat

SEQ ID NO: 2119084 - DNA, 15 bp, Homo sapiens
aattgctgattaata

SEQ ID NO: 2119085 - DNA, 15 bp, Homo sapiens
attgctgattaatat

SEQ ID NO: 2119086 - DNA, 15 bp, Homo sapiens
ttgctgattaatatg

SEQ ID NO: 2119087 - DNA, 15 bp, Homo sapiens
tgctgattaatatgc

SEQ ID NO: 2119088 - DNA, 15 bp, Homo sapiens
gctgattaatatgca

SEQ ID NO: 2119089 - DNA, 15 bp, Homo sapiens
ctgattaatatgcaa

SEQ ID NO: 2119090 - DNA, 15 bp, Homo sapiens
tgattaatatgcaat

SEQ ID NO: 2119091 - DNA, 15 bp, Homo sapiens
gattaatatgcaatg

SEQ ID NO: 2119092 - DNA, 15 bp, Homo sapiens
attaatatgcaatgc

SEQ ID NO: 2119093 - DNA, 15 bp, Homo sapiens
ttaatatgcaatgca

SEQ ID NO: 2119094 - DNA, 15 bp, Homo sapiens
taatatgcaatgcac

SEQ ID NO: 2119095 - DNA, 15 bp, Homo sapiens
aatatgcaatgcaca

SEQ ID NO: 2119096 - DNA, 15 bp, Homo sapiens
atatgcaatgcacat

SEQ ID NO: 2119097 - DNA, 15 bp, Homo sapiens
tatgcaatgcacatg

SEQ ID NO: 2119098 - DNA, 15 bp, Homo sapiens
atgcaatgcacatga

SEQ ID NO: 2119099 - DNA, 15 bp, Homo sapiens
tgcaatgcacatgac

SEQ ID NO: 2119100 - DNA, 15 bp, Homo sapiens
gcaatgcacatgaca

SEQ ID NO: 2119101 - DNA, 15 bp, Homo sapiens
caatgcacatgacaa

SEQ ID NO: 2119102 - DNA, 15 bp, Homo sapiens
aatgcacatgacaat

SEQ ID NO: 2119103 - DNA, 15 bp, Homo sapiens
atgcacatgacaatg

SEQ ID NO: 2119104 - DNA, 15 bp, Homo sapiens
tgcacatgacaatgc

SEQ ID NO: 2119105 - DNA, 15 bp, Homo sapiens
gcacatgacaatgct

SEQ ID NO: 2119106 - DNA, 15 bp, Homo sapiens
cacatgacaatgctg

SEQ ID NO: 2119107 - DNA, 15 bp, Homo sapiens
acatgacaatgctgt

SEQ ID NO: 2119108 - DNA, 15 bp, Homo sapiens
catgacaatgctgtt

SEQ ID NO: 2119109 - DNA, 15 bp, Homo sapiens
atgacaatgctgtta

SEQ ID NO: 2119110 - DNA, 15 bp, Homo sapiens
tgacaatgctgttaa

SEQ ID NO: 2119111 - DNA, 15 bp, Homo sapiens
gacaatgctgttaat

SEQ ID NO: 2119112 - DNA, 15 bp, Homo sapiens
acaatgctgttaatc

SEQ ID NO: 2119113 - DNA, 15 bp, Homo sapiens
caatgctgttaatca

SEQ ID NO: 2119114 - DNA, 15 bp, Homo sapiens
aatgctgttaatcag

SEQ ID NO: 2119115 - DNA, 15 bp, Homo sapiens
atgctgttaatcagg

SEQ ID NO: 2119116 - DNA, 15 bp, Homo sapiens
tgctgttaatcaggg

SEQ ID NO: 2119117 - DNA, 15 bp, Homo sapiens
gctgttaatcagggc

SEQ ID NO: 2119118 - DNA, 15 bp, Homo sapiens
ctgttaatcagggca

SEQ ID NO: 2119119 - DNA, 15 bp, Homo sapiens
tgttaatcagggcac

SEQ ID NO: 2119120 - DNA, 15 bp, Homo sapiens
gttaatcagggcact

SEQ ID NO: 2119121 - DNA, 15 bp, Homo sapiens
ttaatcagggcactt

SEQ ID NO: 2119122 - DNA, 15 bp, Homo sapiens
taatcagggcacttt

SEQ ID NO: 2119123 - DNA, 15 bp, Homo sapiens
aatcagggcactttt

SEQ ID NO: 2119124 - DNA, 15 bp, Homo sapiens
atcagggcacttttt

SEQ ID NO: 2119125 - DNA, 15 bp, Homo sapiens
tcagggcactttttg

SEQ ID NO: 2119126 - DNA, 15 bp, Homo sapiens
cagggcactttttgt

SEQ ID NO: 2119127 - DNA, 15 bp, Homo sapiens
agggcactttttgta

SEQ ID NO: 2119128 - DNA, 15 bp, Homo sapiens
gggcactttttgtaa

SEQ ID NO: 2119129 - DNA, 15 bp, Homo sapiens
ggcactttttgtaac

SEQ ID NO: 2119130 - DNA, 15 bp, Homo sapiens
gcactttttgtaaca

SEQ ID NO: 2119131 - DNA, 15 bp, Homo sapiens
cactttttgtaacag

SEQ ID NO: 2119132 - DNA, 15 bp, Homo sapiens
actttttgtaacagc

SEQ ID NO: 2119133 - DNA, 15 bp, Homo sapiens
ctttttgtaacagca

SEQ ID NO: 2119134 - DNA, 15 bp, Homo sapiens
tttttgtaacagcac

SEQ ID NO: 2119135 - DNA, 15 bp, Homo sapiens
ttttgtaacagcaca

SEQ ID NO: 2119136 - DNA, 15 bp, Homo sapiens
tttgtaacagcacac

SEQ ID NO: 2119137 - DNA, 15 bp, Homo sapiens
ttgtaacagcacacc

SEQ ID NO: 2119138 - DNA, 15 bp, Homo sapiens
tgtaacagcacacca

SEQ ID NO: 2119139 - DNA, 15 bp, Homo sapiens
gtaacagcacaccaa

SEQ ID NO: 2119140 - DNA, 15 bp, Homo sapiens
taacagcacaccaac

SEQ ID NO: 2119141 - DNA, 15 bp, Homo sapiens
aacagcacaccaact

SEQ ID NO: 2119142 - DNA, 15 bp, Homo sapiens
acagcacaccaactt

SEQ ID NO: 2119143 - DNA, 15 bp, Homo sapiens
cagcacaccaacttt

SEQ ID NO: 2119144 - DNA, 15 bp, Homo sapiens
agcacaccaactttc

SEQ ID NO: 2119145 - DNA, 15 bp, Homo sapiens
gcacaccaactttct

SEQ ID NO: 2119146 - DNA, 15 bp, Homo sapiens
cacaccaactttctt

SEQ ID NO: 2119147 - DNA, 15 bp, Homo sapiens
acaccaactttcttg

SEQ ID NO: 2119148 - DNA, 15 bp, Homo sapiens
caccaactttcttga

SEQ ID NO: 2119149 - DNA, 15 bp, Homo sapiens
accaactttcttgac

SEQ ID NO: 2119150 - DNA, 15 bp, Homo sapiens
ccaactttcttgact

SEQ ID NO: 2119151 - DNA, 15 bp, Homo sapiens
caactttcttgacta

SEQ ID NO: 2119152 - DNA, 15 bp, Homo sapiens
aactttcttgactaa

SEQ ID NO: 2119153 - DNA, 15 bp, Homo sapiens
actttcttgactaaa

SEQ ID NO: 2119154 - DNA, 15 bp, Homo sapiens
ctttcttgactaaaa

SEQ ID NO: 2119155 - DNA, 15 bp, Homo sapiens
tttcttgactaaaat

SEQ ID NO: 2119156 - DNA, 15 bp, Homo sapiens
ttcttgactaaaatt

SEQ ID NO: 2119157 - DNA, 15 bp, Homo sapiens
tcttgactaaaattg

SEQ ID NO: 2119158 - DNA, 15 bp, Homo sapiens
cttgactaaaattga

SEQ ID NO: 2119159 - DNA, 15 bp, Homo sapiens
ttgactaaaattgaa

SEQ ID NO: 2119160 - DNA, 15 bp, Homo sapiens
tgactaaaattgaaa

SEQ ID NO: 2119161 - DNA, 15 bp, Homo sapiens
gactaaaattgaaag

SEQ ID NO: 2119162 - DNA, 15 bp, Homo sapiens
actaaaattgaaagg

SEQ ID NO: 2119163 - DNA, 15 bp, Homo sapiens
ctaaaattgaaaggt

SEQ ID NO: 2119164 - DNA, 15 bp, Homo sapiens
taaaattgaaaggtt

SEQ ID NO: 2119165 - DNA, 15 bp, Homo sapiens
aaaattgaaaggtta

SEQ ID NO: 2119166 - DNA, 15 bp, Homo sapiens
aaattgaaaggttaa

SEQ ID NO: 2119167 - DNA, 15 bp, Homo sapiens
aattgaaaggttaaa

SEQ ID NO: 2119168 - DNA, 15 bp, Homo sapiens
attgaaaggttaaaa

SEQ ID NO: 2119169 - DNA, 15 bp, Homo sapiens
ttgaaaggttaaaaa

SEQ ID NO: 2119170 - DNA, 15 bp, Homo sapiens
tgaaaggttaaaaat

SEQ ID NO: 2119171 - DNA, 15 bp, Homo sapiens
gaaaggttaaaaatt

SEQ ID NO: 2119172 - DNA, 15 bp, Homo sapiens
aaaggttaaaaatta

SEQ ID NO: 2119173 - DNA, 15 bp, Homo sapiens
aaggttaaaaattat

SEQ ID NO: 2119174 - DNA, 15 bp, Homo sapiens
aggttaaaaattata

SEQ ID NO: 2119175 - DNA, 15 bp, Homo sapiens
ggttaaaaattatat

SEQ ID NO: 2119176 - DNA, 15 bp, Homo sapiens
gttaaaaattatatt

SEQ ID NO: 2119177 - DNA, 15 bp, Homo sapiens
ttaaaaattatattt

SEQ ID NO: 2119178 - DNA, 15 bp, Homo sapiens
taaaaattatatttg

SEQ ID NO: 2119179 - DNA, 15 bp, Homo sapiens
aaaaattatatttgg

SEQ ID NO: 2119180 - DNA, 15 bp, Homo sapiens
aaaattatatttggg

SEQ ID NO: 2119181 - DNA, 15 bp, Homo sapiens
aaattatatttgggt

SEQ ID NO: 2119182 - DNA, 15 bp, Homo sapiens
aattatatttgggtt

SEQ ID NO: 2119183 - DNA, 15 bp, Homo sapiens
attatatttgggtta

SEQ ID NO: 2119184 - DNA, 15 bp, Homo sapiens
ttatatttgggttac

SEQ ID NO: 2119185 - DNA, 15 bp, Homo sapiens
tatatttgggttaca

SEQ ID NO: 2119186 - DNA, 15 bp, Homo sapiens
atatttgggttacaa

SEQ ID NO: 2119187 - DNA, 15 bp, Homo sapiens
tatttgggttacaat

SEQ ID NO: 2119188 - DNA, 15 bp, Homo sapiens
atttgggttacaatt

SEQ ID NO: 2119189 - DNA, 15 bp, Homo sapiens
tttgggttacaattg

SEQ ID NO: 2119190 - DNA, 15 bp, Homo sapiens
ttgggttacaattgc

SEQ ID NO: 2119191 - DNA, 15 bp, Homo sapiens
tgggttacaattgcc

SEQ ID NO: 2119192 - DNA, 15 bp, Homo sapiens
gggttacaattgcca

SEQ ID NO: 2119193 - DNA, 15 bp, Homo sapiens
ggttacaattgccaa

SEQ ID NO: 2119194 - DNA, 15 bp, Homo sapiens
gttacaattgccaag

SEQ ID NO: 2119195 - DNA, 15 bp, Homo sapiens
ttacaattgccaagg

SEQ ID NO: 2119196 - DNA, 15 bp, Homo sapiens
tacaattgccaagga

SEQ ID NO: 2119197 - DNA, 15 bp, Homo sapiens
acaattgccaaggaa

SEQ ID NO: 2119198 - DNA, 15 bp, Homo sapiens
caattgccaaggaag

SEQ ID NO: 2119199 - DNA, 15 bp, Homo sapiens
aattgccaaggaaga

SEQ ID NO: 2119200 - DNA, 15 bp, Homo sapiens
attgccaaggaagac

SEQ ID NO: 2119201 - DNA, 15 bp, Homo sapiens
ttgccaaggaagaca

SEQ ID NO: 2119202 - DNA, 15 bp, Homo sapiens
tgccaaggaagacat

SEQ ID NO: 2119203 - DNA, 15 bp, Homo sapiens
gccaaggaagacatc

SEQ ID NO: 2119204 - DNA, 15 bp, Homo sapiens
ccaaggaagacatct

SEQ ID NO: 2119205 - DNA, 15 bp, Homo sapiens
caaggaagacatcta

SEQ ID NO: 2119206 - DNA, 15 bp, Homo sapiens
aaggaagacatctac

SEQ ID NO: 2119207 - DNA, 15 bp, Homo sapiens
aggaagacatctact

SEQ ID NO: 2119208 - DNA, 15 bp, Homo sapiens
ggaagacatctactc

SEQ ID NO: 2119209 - DNA, 15 bp, Homo sapiens
gaagacatctactcc

SEQ ID NO: 2119210 - DNA, 15 bp, Homo sapiens
aagacatctactcct

SEQ ID NO: 2119211 - DNA, 15 bp, Homo sapiens
agacatctactcctt

SEQ ID NO: 2119212 - DNA, 15 bp, Homo sapiens
gacatctactccttg

SEQ ID NO: 2119213 - DNA, 15 bp, Homo sapiens
acatctactccttgg

SEQ ID NO: 2119214 - DNA, 15 bp, Homo sapiens
catctactccttggg

SEQ ID NO: 2119215 - DNA, 15 bp, Homo sapiens
atctactccttgggt

SEQ ID NO: 2119216 - DNA, 15 bp, Homo sapiens
tctactccttgggtc

SEQ ID NO: 2119217 - DNA, 15 bp, Homo sapiens
ctactccttgggtct

SEQ ID NO: 2119218 - DNA, 15 bp, Homo sapiens
tactccttgggtctt

SEQ ID NO: 2119219 - DNA, 15 bp, Homo sapiens
actccttgggtctta

SEQ ID NO: 2119220 - DNA, 15 bp, Homo sapiens
ctccttgggtcttaa

SEQ ID NO: 2119221 - DNA, 15 bp, Homo sapiens
tccttgggtcttaaa

SEQ ID NO: 2119222 - DNA, 15 bp, Homo sapiens
ccttgggtcttaaat

SEQ ID NO: 2119223 - DNA, 15 bp, Homo sapiens
cttgggtcttaaata

SEQ ID NO: 2119224 - DNA, 15 bp, Homo sapiens
ttgggtcttaaatag

SEQ ID NO: 2119225 - DNA, 15 bp, Homo sapiens
tgggtcttaaatagg

SEQ ID NO: 2119226 - DNA, 15 bp, Homo sapiens
gggtcttaaataggc

SEQ ID NO: 2119227 - DNA, 15 bp, Homo sapiens
ggtcttaaataggca

SEQ ID NO: 2119228 - DNA, 15 bp, Homo sapiens
gtcttaaataggcac

SEQ ID NO: 2119229 - DNA, 15 bp, Homo sapiens
tcttaaataggcact

SEQ ID NO: 2119230 - DNA, 15 bp, Homo sapiens
cttaaataggcactt

SEQ ID NO: 2119231 - DNA, 15 bp, Homo sapiens
ttaaataggcacttt

SEQ ID NO: 2119232 - DNA, 15 bp, Homo sapiens
taaataggcactttg

SEQ ID NO: 2119233 - DNA, 15 bp, Homo sapiens
aaataggcactttgg

SEQ ID NO: 2119234 - DNA, 15 bp, Homo sapiens
aataggcactttgga

SEQ ID NO: 2119235 - DNA, 15 bp, Homo sapiens
ataggcactttggaa

SEQ ID NO: 2119236 - DNA, 15 bp, Homo sapiens
taggcactttggaag

SEQ ID NO: 2119237 - DNA, 15 bp, Homo sapiens
aggcactttggaagg

SEQ ID NO: 2119238 - DNA, 15 bp, Homo sapiens
ggcactttggaaggc

SEQ ID NO: 2119239 - DNA, 15 bp, Homo sapiens
cactttggaaggcta

SEQ ID NO: 2119240 - DNA, 15 bp, Homo sapiens
actttggaaggctag

SEQ ID NO: 2119241 - DNA, 15 bp, Homo sapiens
ctttggaaggctagc

SEQ ID NO: 2119242 - DNA, 15 bp, Homo sapiens
tttggaaggctagct

SEQ ID NO: 2119243 - DNA, 15 bp, Homo sapiens
ttggaaggctagctg

SEQ ID NO: 2119244 - DNA, 15 bp, Homo sapiens
tggaaggctagctgg

SEQ ID NO: 2119245 - DNA, 15 bp, Homo sapiens
ggaaggctagctgga

SEQ ID NO: 2119246 - DNA, 15 bp, Homo sapiens
gaaggctagctggag

SEQ ID NO: 2119247 - DNA, 15 bp, Homo sapiens
aaggctagctggagg

SEQ ID NO: 2119248 - DNA, 15 bp, Homo sapiens
aggctagctggaggt

SEQ ID NO: 2119249 - DNA, 15 bp, Homo sapiens
ggctagctggaggtc

SEQ ID NO: 2119250 - DNA, 15 bp, Homo sapiens
gctagctggaggtca

SEQ ID NO: 2119251 - DNA, 15 bp, Homo sapiens
ctagctggaggtcag

SEQ ID NO: 2119252 - DNA, 15 bp, Homo sapiens
tagctggaggtcagt

SEQ ID NO: 2119253 - DNA, 15 bp, Homo sapiens
agctggaggtcagta

SEQ ID NO: 2119254 - DNA, 15 bp, Homo sapiens
gctggaggtcagtaa

SEQ ID NO: 2119255 - DNA, 15 bp, Homo sapiens
ctggaggtcagtaaa

SEQ ID NO: 2119256 - DNA, 15 bp, Homo sapiens
tggaggtcagtaaat

SEQ ID NO: 2119257 - DNA, 15 bp, Homo sapiens
ggaggtcagtaaatg

SEQ ID NO: 2119258 - DNA, 15 bp, Homo sapiens
gaggtcagtaaatga

SEQ ID NO: 2119259 - DNA, 15 bp, Homo sapiens
aggtcagtaaatgaa

SEQ ID NO: 2119260 - DNA, 15 bp, Homo sapiens
ggtcagtaaatgaac

SEQ ID NO: 2119261 - DNA, 15 bp, Homo sapiens
gtcagtaaatgaacc

SEQ ID NO: 2119262 - DNA, 15 bp, Homo sapiens
tcagtaaatgaacct

SEQ ID NO: 2119263 - DNA, 15 bp, Homo sapiens
cagtaaatgaacctt

SEQ ID NO: 2119264 - DNA, 15 bp, Homo sapiens
agtaaatgaaccttt

SEQ ID NO: 2119265 - DNA, 15 bp, Homo sapiens
gtaaatgaacctttc

SEQ ID NO: 2119266 - DNA, 15 bp, Homo sapiens
taaatgaacctttcc

SEQ ID NO: 2119267 - DNA, 15 bp, Homo sapiens
aaatgaacctttcct

SEQ ID NO: 2119268 - DNA, 15 bp, Homo sapiens
aatgaacctttccta

SEQ ID NO: 2119269 - DNA, 15 bp, Homo sapiens
atgaacctttcctat

SEQ ID NO: 2119270 - DNA, 15 bp, Homo sapiens
tgaacctttcctatc

SEQ ID NO: 2119271 - DNA, 15 bp, Homo sapiens
gaacctttcctatcc

SEQ ID NO: 2119272 - DNA, 15 bp, Homo sapiens
aacctttcctatccc

SEQ ID NO: 2119273 - DNA, 15 bp, Homo sapiens
acctttcctatccca

SEQ ID NO: 2119274 - DNA, 15 bp, Homo sapiens
cctttcctatcccac

SEQ ID NO: 2119275 - DNA, 15 bp, Homo sapiens
ctttcctatcccacg

SEQ ID NO: 2119276 - DNA, 15 bp, Homo sapiens
tttcctatcccacgt

SEQ ID NO: 2119277 - DNA, 15 bp, Homo sapiens
ttcctatcccacgtg

SEQ ID NO: 2119278 - DNA, 15 bp, Homo sapiens
tcctatcccacgtgt

SEQ ID NO: 2119279 - DNA, 15 bp, Homo sapiens
cctatcccacgtgtg

SEQ ID NO: 2119280 - DNA, 15 bp, Homo sapiens
ctatcccacgtgtga

SEQ ID NO: 2119281 - DNA, 15 bp, Homo sapiens
tatcccacgtgtgaa

SEQ ID NO: 2119282 - DNA, 15 bp, Homo sapiens
atcccacgtgtgaac

SEQ ID NO: 2119283 - DNA, 15 bp, Homo sapiens
tcccacgtgtgaaca

SEQ ID NO: 2119284 - DNA, 15 bp, Homo sapiens
cccacgtgtgaacat

SEQ ID NO: 2119285 - DNA, 15 bp, Homo sapiens
ccacgtgtgaacatg

SEQ ID NO: 2119286 - DNA, 15 bp, Homo sapiens
cacgtgtgaacatgc

SEQ ID NO: 2119287 - DNA, 15 bp, Homo sapiens
acgtgtgaacatgcc

SEQ ID NO: 2119288 - DNA, 15 bp, Homo sapiens
cgtgtgaacatgcct

SEQ ID NO: 2119289 - DNA, 15 bp, Homo sapiens
gtgtgaacatgcctt

SEQ ID NO: 2119290 - DNA, 15 bp, Homo sapiens
tgtgaacatgccttt

SEQ ID NO: 2119291 - DNA, 15 bp, Homo sapiens
gtgaacatgcctttc

SEQ ID NO: 2119292 - DNA, 15 bp, Homo sapiens
tgaacatgcctttcc

SEQ ID NO: 2119293 - DNA, 15 bp, Homo sapiens
gaacatgcctttccc

SEQ ID NO: 2119294 - DNA, 15 bp, Homo sapiens
aacatgcctttccct

SEQ ID NO: 2119295 - DNA, 15 bp, Homo sapiens
acatgcctttccctt

SEQ ID NO: 2119296 - DNA, 15 bp, Homo sapiens
catgcctttcccttc

SEQ ID NO: 2119297 - DNA, 15 bp, Homo sapiens
atgcctttcccttcc

SEQ ID NO: 2119298 - DNA, 15 bp, Homo sapiens
tgcctttcccttcct

SEQ ID NO: 2119299 - DNA, 15 bp, Homo sapiens
gcctttcccttcctt

SEQ ID NO: 2119300 - DNA, 15 bp, Homo sapiens
cctttcccttccttt

SEQ ID NO: 2119301 - DNA, 15 bp, Homo sapiens
ctttcccttcctttc

SEQ ID NO: 2119302 - DNA, 15 bp, Homo sapiens
tttcccttcctttcc

SEQ ID NO: 2119303 - DNA, 15 bp, Homo sapiens
ttcccttcctttccc

SEQ ID NO: 2119304 - DNA, 15 bp, Homo sapiens
tcccttcctttccca

SEQ ID NO: 2119305 - DNA, 15 bp, Homo sapiens
cccttcctttcccac

SEQ ID NO: 2119306 - DNA, 15 bp, Homo sapiens
ccttcctttcccacc

SEQ ID NO: 2119307 - DNA, 15 bp, Homo sapiens
cttcctttcccacct

SEQ ID NO: 2119308 - DNA, 15 bp, Homo sapiens
ttcctttcccacctc

SEQ ID NO: 2119309 - DNA, 15 bp, Homo sapiens
tcctttcccacctcc

SEQ ID NO: 2119310 - DNA, 15 bp, Homo sapiens
cctttcccacctcca

SEQ ID NO: 2119311 - DNA, 15 bp, Homo sapiens
ctttcccacctccag

SEQ ID NO: 2119312 - DNA, 15 bp, Homo sapiens
ttcccacctccagtg

SEQ ID NO: 2119313 - DNA, 15 bp, Homo sapiens
tcccacctccagtgt

SEQ ID NO: 2119314 - DNA, 15 bp, Homo sapiens
cccacctccagtgtt

SEQ ID NO: 2119315 - DNA, 15 bp, Homo sapiens
ccacctccagtgttc

SEQ ID NO: 2119316 - DNA, 15 bp, Homo sapiens
cacctccagtgttct

SEQ ID NO: 2119317 - DNA, 15 bp, Homo sapiens
acctccagtgttctc

SEQ ID NO: 2119318 - DNA, 15 bp, Homo sapiens
cctccagtgttctca

SEQ ID NO: 2119319 - DNA, 15 bp, Homo sapiens
ctccagtgttctcag

SEQ ID NO: 2119320 - DNA, 15 bp, Homo sapiens
tccagtgttctcagg

SEQ ID NO: 2119321 - DNA, 15 bp, Homo sapiens
ccagtgttctcaggg

SEQ ID NO: 2119322 - DNA, 15 bp, Homo sapiens
cagtgttctcagggt

SEQ ID NO: 2119323 - DNA, 15 bp, Homo sapiens
agtgttctcagggtc

SEQ ID NO: 2119324 - DNA, 15 bp, Homo sapiens
gtgttctcagggtcc

SEQ ID NO: 2119325 - DNA, 15 bp, Homo sapiens
tgttctcagggtcct

SEQ ID NO: 2119326 - DNA, 15 bp, Homo sapiens
gttctcagggtcctt

SEQ ID NO: 2119327 - DNA, 15 bp, Homo sapiens
ttctcagggtccttt

SEQ ID NO: 2119328 - DNA, 15 bp, Homo sapiens
tctcagggtccttta

SEQ ID NO: 2119329 - DNA, 15 bp, Homo sapiens
ctcagggtcctttag

SEQ ID NO: 2119330 - DNA, 15 bp, Homo sapiens
tcagggtcctttagc

SEQ ID NO: 2119331 - DNA, 15 bp, Homo sapiens
cagggtcctttagct

SEQ ID NO: 2119332 - DNA, 15 bp, Homo sapiens
agggtcctttagctc

SEQ ID NO: 2119333 - DNA, 15 bp, Homo sapiens
gggtcctttagctct

SEQ ID NO: 2119334 - DNA, 15 bp, Homo sapiens
ggtcctttagctctt

SEQ ID NO: 2119335 - DNA, 15 bp, Homo sapiens
gtcctttagctctta

SEQ ID NO: 2119336 - DNA, 15 bp, Homo sapiens
tcctttagctcttag

SEQ ID NO: 2119337 - DNA, 15 bp, Homo sapiens
cctttagctcttaga

SEQ ID NO: 2119338 - DNA, 15 bp, Homo sapiens
ctttagctcttagaa

SEQ ID NO: 2119339 - DNA, 15 bp, Homo sapiens
tttagctcttagaaa

SEQ ID NO: 2119340 - DNA, 15 bp, Homo sapiens
ttagctcttagaaaa

SEQ ID NO: 2119341 - DNA, 15 bp, Homo sapiens
tagctcttagaaaaa

SEQ ID NO: 2119342 - DNA, 15 bp, Homo sapiens
agctcttagaaaaaa

SEQ ID NO: 2119343 - DNA, 15 bp, Homo sapiens
gctcttagaaaaaaa

SEQ ID NO: 2119344 - DNA, 15 bp, Homo sapiens
ctcttagaaaaaaac

SEQ ID NO: 2119345 - DNA, 15 bp, Homo sapiens
tcttagaaaaaaacg

SEQ ID NO: 2119346 - DNA, 15 bp, Homo sapiens
cttagaaaaaaacgg

SEQ ID NO: 2119347 - DNA, 15 bp, Homo sapiens
ttagaaaaaaacgga

SEQ ID NO: 2119348 - DNA, 15 bp, Homo sapiens
tagaaaaaaacggaa

SEQ ID NO: 2119349 - DNA, 15 bp, Homo sapiens
agaaaaaaacggaaa

SEQ ID NO: 2119350 - DNA, 15 bp, Homo sapiens
gaaaaaaacggaaag

SEQ ID NO: 2119351 - DNA, 15 bp, Homo sapiens
aaaaaaacggaaaga

SEQ ID NO: 2119352 - DNA, 15 bp, Homo sapiens
aaaaaacggaaagaa

SEQ ID NO: 2119353 - DNA, 15 bp, Homo sapiens
aaaaacggaaagaag

SEQ ID NO: 2119354 - DNA, 15 bp, Homo sapiens
aaaacggaaagaaga

SEQ ID NO: 2119355 - DNA, 15 bp, Homo sapiens
aaacggaaagaagaa

SEQ ID NO: 2119356 - DNA, 15 bp, Homo sapiens
aacggaaagaagaaa

SEQ ID NO: 2119357 - DNA, 15 bp, Homo sapiens
acggaaagaagaaat

SEQ ID NO: 2119358 - DNA, 15 bp, Homo sapiens
cggaaagaagaaatg

SEQ ID NO: 2119359 - DNA, 15 bp, Homo sapiens
ggaaagaagaaatgc

SEQ ID NO: 2119360 - DNA, 15 bp, Homo sapiens
gaaagaagaaatgca

SEQ ID NO: 2119361 - DNA, 15 bp, Homo sapiens
aaagaagaaatgcat

SEQ ID NO: 2119362 - DNA, 15 bp, Homo sapiens
aagaagaaatgcata

SEQ ID NO: 2119363 - DNA, 15 bp, Homo sapiens
agaagaaatgcatac

SEQ ID NO: 2119364 - DNA, 15 bp, Homo sapiens
gaagaaatgcatacc

SEQ ID NO: 2119365 - DNA, 15 bp, Homo sapiens
aagaaatgcataccc

SEQ ID NO: 2119366 - DNA, 15 bp, Homo sapiens
agaaatgcataccca

SEQ ID NO: 2119367 - DNA, 15 bp, Homo sapiens
gaaatgcatacccaa

SEQ ID NO: 2119368 - DNA, 15 bp, Homo sapiens
aaatgcatacccaag

SEQ ID NO: 2119369 - DNA, 15 bp, Homo sapiens
aatgcatacccaagg

SEQ ID NO: 2119370 - DNA, 15 bp, Homo sapiens
atgcatacccaagga

SEQ ID NO: 2119371 - DNA, 15 bp, Homo sapiens
tgcatacccaaggaa

SEQ ID NO: 2119372 - DNA, 15 bp, Homo sapiens
gcatacccaaggaac

SEQ ID NO: 2119373 - DNA, 15 bp, Homo sapiens
catacccaaggaaca

SEQ ID NO: 2119374 - DNA, 15 bp, Homo sapiens
atacccaaggaacag

SEQ ID NO: 2119375 - DNA, 15 bp, Homo sapiens
tacccaaggaacagc

SEQ ID NO: 2119376 - DNA, 15 bp, Homo sapiens
acccaaggaacagct

SEQ ID NO: 2119377 - DNA, 15 bp, Homo sapiens
cccaaggaacagctt

SEQ ID NO: 2119378 - DNA, 15 bp, Homo sapiens
ccaaggaacagctta

SEQ ID NO: 2119379 - DNA, 15 bp, Homo sapiens
caaggaacagcttac

SEQ ID NO: 2119380 - DNA, 15 bp, Homo sapiens
aaggaacagcttacc

SEQ ID NO: 2119381 - DNA, 15 bp, Homo sapiens
aggaacagcttacct

SEQ ID NO: 2119382 - DNA, 15 bp, Homo sapiens
ggaacagcttacctg

SEQ ID NO: 2119383 - DNA, 15 bp, Homo sapiens
gaacagcttacctgg

SEQ ID NO: 2119384 - DNA, 15 bp, Homo sapiens
aacagcttacctggc

SEQ ID NO: 2119385 - DNA, 15 bp, Homo sapiens
acagcttacctggcg

SEQ ID NO: 2119386 - DNA, 15 bp, Homo sapiens
cagcttacctggcga

SEQ ID NO: 2119387 - DNA, 15 bp, Homo sapiens
agcttacctggcgat

SEQ ID NO: 2119388 - DNA, 15 bp, Homo sapiens
gcttacctggcgata

SEQ ID NO: 2119389 - DNA, 15 bp, Homo sapiens
cttacctggcgatat

SEQ ID NO: 2119390 - DNA, 15 bp, Homo sapiens
ttacctggcgatatc

SEQ ID NO: 2119391 - DNA, 15 bp, Homo sapiens
tacctggcgatatca

SEQ ID NO: 2119392 - DNA, 15 bp, Homo sapiens
acctggcgatatcag

SEQ ID NO: 2119393 - DNA, 15 bp, Homo sapiens
cctggcgatatcaga

SEQ ID NO: 2119394 - DNA, 15 bp, Homo sapiens
ctggcgatatcagaa

SEQ ID NO: 2119395 - DNA, 15 bp, Homo sapiens
tggcgatatcagaat

SEQ ID NO: 2119396 - DNA, 15 bp, Homo sapiens
ggcgatatcagaata

SEQ ID NO: 2119397 - DNA, 15 bp, Homo sapiens
gcgatatcagaataa

SEQ ID NO: 2119398 - DNA, 15 bp, Homo sapiens
cgatatcagaataat

SEQ ID NO: 2119399 - DNA, 15 bp, Homo sapiens
gatatcagaataatt

SEQ ID NO: 2119400 - DNA, 15 bp, Homo sapiens
atatcagaataattt

SEQ ID NO: 2119401 - DNA, 15 bp, Homo sapiens
tatcagaataattta

SEQ ID NO: 2119402 - DNA, 15 bp, Homo sapiens
atcagaataatttaa

SEQ ID NO: 2119403 - DNA, 15 bp, Homo sapiens
tcagaataatttaat

SEQ ID NO: 2119404 - DNA, 15 bp, Homo sapiens
cagaataatttaatc

SEQ ID NO: 2119405 - DNA, 15 bp, Homo sapiens
agaataatttaatct

SEQ ID NO: 2119406 - DNA, 15 bp, Homo sapiens
gaataatttaatctg

SEQ ID NO: 2119407 - DNA, 15 bp, Homo sapiens
aataatttaatctga

SEQ ID NO: 2119408 - DNA, 15 bp, Homo sapiens
ataatttaatctgaa

SEQ ID NO: 2119409 - DNA, 15 bp, Homo sapiens
taatttaatctgaaa

SEQ ID NO: 2119410 - DNA, 15 bp, Homo sapiens
aatttaatctgaaaa

SEQ ID NO: 2119411 - DNA, 15 bp, Homo sapiens
atttaatctgaaaat

SEQ ID NO: 2119412 - DNA, 15 bp, Homo sapiens
tttaatctgaaaatc

SEQ ID NO: 2119413 - DNA, 15 bp, Homo sapiens
ttaatctgaaaatca

SEQ ID NO: 2119414 - DNA, 15 bp, Homo sapiens
taatctgaaaatcaa

SEQ ID NO: 2119415 - DNA, 15 bp, Homo sapiens
aatctgaaaatcaat

SEQ ID NO: 2119416 - DNA, 15 bp, Homo sapiens
atctgaaaatcaatg

SEQ ID NO: 2119417 - DNA, 15 bp, Homo sapiens
tctgaaaatcaatgt

SEQ ID NO: 2119418 - DNA, 15 bp, Homo sapiens
ctgaaaatcaatgtc

SEQ ID NO: 2119419 - DNA, 15 bp, Homo sapiens
tgaaaatcaatgtca

SEQ ID NO: 2119420 - DNA, 15 bp, Homo sapiens
gaaaatcaatgtcaa

SEQ ID NO: 2119421 - DNA, 15 bp, Homo sapiens
aaaatcaatgtcaaa

SEQ ID NO: 2119422 - DNA, 15 bp, Homo sapiens
aaatcaatgtcaaaa

SEQ ID NO: 2119423 - DNA, 15 bp, Homo sapiens
aatcaatgtcaaaat

SEQ ID NO: 2119424 - DNA, 15 bp, Homo sapiens
atcaatgtcaaaatg

SEQ ID NO: 2119425 - DNA, 15 bp, Homo sapiens
tcaatgtcaaaatgt

SEQ ID NO: 2119426 - DNA, 15 bp, Homo sapiens
caatgtcaaaatgtg

SEQ ID NO: 2119427 - DNA, 15 bp, Homo sapiens
aatgtcaaaatgtgg

SEQ ID NO: 2119428 - DNA, 15 bp, Homo sapiens
atgtcaaaatgtgga

SEQ ID NO: 2119429 - DNA, 15 bp, Homo sapiens
tgtcaaaatgtggat

SEQ ID NO: 2119430 - DNA, 15 bp, Homo sapiens
gtcaaaatgtggatt

SEQ ID NO: 2119431 - DNA, 15 bp, Homo sapiens
tcaaaatgtggattg

SEQ ID NO: 2119432 - DNA, 15 bp, Homo sapiens
caaaatgtggattga

SEQ ID NO: 2119433 - DNA, 15 bp, Homo sapiens
aaaatgtggattgaa

SEQ ID NO: 2119434 - DNA, 15 bp, Homo sapiens
aaatgtggattgaag

SEQ ID NO: 2119435 - DNA, 15 bp, Homo sapiens
aatgtggattgaagt

SEQ ID NO: 2119436 - DNA, 15 bp, Homo sapiens
atgtggattgaagta

SEQ ID NO: 2119437 - DNA, 15 bp, Homo sapiens
tgtggattgaagtaa

SEQ ID NO: 2119438 - DNA, 15 bp, Homo sapiens
gtggattgaagtaaa

SEQ ID NO: 2119439 - DNA, 15 bp, Homo sapiens
tggattgaagtaaat

SEQ ID NO: 2119440 - DNA, 15 bp, Homo sapiens
ggattgaagtaaatt

SEQ ID NO: 2119441 - DNA, 15 bp, Homo sapiens
gattgaagtaaattc

SEQ ID NO: 2119442 - DNA, 15 bp, Homo sapiens
attgaagtaaattct

SEQ ID NO: 2119443 - DNA, 15 bp, Homo sapiens
ttgaagtaaattctg

SEQ ID NO: 2119444 - DNA, 15 bp, Homo sapiens
tgaagtaaattctgg

SEQ ID NO: 2119445 - DNA, 15 bp, Homo sapiens
gaagtaaattctggt

SEQ ID NO: 2119446 - DNA, 15 bp, Homo sapiens
aagtaaattctggtt

SEQ ID NO: 2119447 - DNA, 15 bp, Homo sapiens
agtaaattctggttc

SEQ ID NO: 2119448 - DNA, 15 bp, Homo sapiens
gtaaattctggttct

SEQ ID NO: 2119449 - DNA, 15 bp, Homo sapiens
taaattctggttctt

SEQ ID NO: 2119450 - DNA, 15 bp, Homo sapiens
aaattctggttctta

SEQ ID NO: 2119451 - DNA, 15 bp, Homo sapiens
aattctggttcttaa

SEQ ID NO: 2119452 - DNA, 15 bp, Homo sapiens
attctggttcttaag

SEQ ID NO: 2119453 - DNA, 15 bp, Homo sapiens
ttctggttcttaaga

SEQ ID NO: 2119454 - DNA, 15 bp, Homo sapiens
tctggttcttaagat

SEQ ID NO: 2119455 - DNA, 15 bp, Homo sapiens
ctggttcttaagata

SEQ ID NO: 2119456 - DNA, 15 bp, Homo sapiens
tggttcttaagataa

SEQ ID NO: 2119457 - DNA, 15 bp, Homo sapiens
ggttcttaagataaa

SEQ ID NO: 2119458 - DNA, 15 bp, Homo sapiens
gttcttaagataaag

SEQ ID NO: 2119459 - DNA, 15 bp, Homo sapiens
ttcttaagataaagt

SEQ ID NO: 2119460 - DNA, 15 bp, Homo sapiens
tcttaagataaagtt

SEQ ID NO: 2119461 - DNA, 15 bp, Homo sapiens
cttaagataaagttt

SEQ ID NO: 2119462 - DNA, 15 bp, Homo sapiens
ttaagataaagtttg

SEQ ID NO: 2119463 - DNA, 15 bp, Homo sapiens
taagataaagtttgt

SEQ ID NO: 2119464 - DNA, 15 bp, Homo sapiens
aagataaagtttgtt

SEQ ID NO: 2119465 - DNA, 15 bp, Homo sapiens
agataaagtttgttt

SEQ ID NO: 2119466 - DNA, 15 bp, Homo sapiens
gataaagtttgtttc

SEQ ID NO: 2119467 - DNA, 15 bp, Homo sapiens
ataaagtttgtttct

SEQ ID NO: 2119468 - DNA, 15 bp, Homo sapiens
taaagtttgtttctg

SEQ ID NO: 2119469 - DNA, 15 bp, Homo sapiens
aaagtttgtttctgc

SEQ ID NO: 2119470 - DNA, 15 bp, Homo sapiens
aagtttgtttctgca

SEQ ID NO: 2119471 - DNA, 15 bp, Homo sapiens
agtttgtttctgcaa

SEQ ID NO: 2119472 - DNA, 15 bp, Homo sapiens
gtttgtttctgcaac

SEQ ID NO: 2119473 - DNA, 15 bp, Homo sapiens
tttgtttctgcaacc

SEQ ID NO: 2119474 - DNA, 15 bp, Homo sapiens
ttgtttctgcaacct

SEQ ID NO: 2119475 - DNA, 15 bp, Homo sapiens
tgtttctgcaaccta

SEQ ID NO: 2119476 - DNA, 15 bp, Homo sapiens
gtttctgcaacctat

SEQ ID NO: 2119477 - DNA, 15 bp, Homo sapiens
tttctgcaacctatt

SEQ ID NO: 2119478 - DNA, 15 bp, Homo sapiens
ttctgcaacctattt

SEQ ID NO: 2119479 - DNA, 15 bp, Homo sapiens
tctgcaacctatttt

SEQ ID NO: 2119480 - DNA, 15 bp, Homo sapiens
ctgcaacctatttta

SEQ ID NO: 2119481 - DNA, 15 bp, Homo sapiens
tgcaacctattttac

SEQ ID NO: 2119482 - DNA, 15 bp, Homo sapiens
gcaacctattttacg

SEQ ID NO: 2119483 - DNA, 15 bp, Homo sapiens
caacctattttacgt

SEQ ID NO: 2119484 - DNA, 15 bp, Homo sapiens
aacctattttacgtt

SEQ ID NO: 2119485 - DNA, 15 bp, Homo sapiens
acctattttacgttt

SEQ ID NO: 2119486 - DNA, 15 bp, Homo sapiens
cctattttacgtttc

SEQ ID NO: 2119487 - DNA, 15 bp, Homo sapiens
ctattttacgtttca

SEQ ID NO: 2119488 - DNA, 15 bp, Homo sapiens
tattttacgtttcaa

SEQ ID NO: 2119489 - DNA, 15 bp, Homo sapiens
attttacgtttcaaa

SEQ ID NO: 2119490 - DNA, 15 bp, Homo sapiens
ttttacgtttcaaaa

SEQ ID NO: 2119491 - DNA, 15 bp, Homo sapiens
tttacgtttcaaaac

SEQ ID NO: 2119492 - DNA, 15 bp, Homo sapiens
ttacgtttcaaaact

SEQ ID NO: 2119493 - DNA, 15 bp, Homo sapiens
tacgtttcaaaactg

SEQ ID NO: 2119494 - DNA, 15 bp, Homo sapiens
acgtttcaaaactgg

SEQ ID NO: 2119495 - DNA, 15 bp, Homo sapiens
cgtttcaaaactggc

SEQ ID NO: 2119496 - DNA, 15 bp, Homo sapiens
gtttcaaaactggca

SEQ ID NO: 2119497 - DNA, 15 bp, Homo sapiens
tttcaaaactggcag

SEQ ID NO: 2119498 - DNA, 15 bp, Homo sapiens
ttcaaaactggcaga

SEQ ID NO: 2119499 - DNA, 15 bp, Homo sapiens
tcaaaactggcagaa

SEQ ID NO: 2119500 - DNA, 15 bp, Homo sapiens
caaaactggcagaaa

SEQ ID NO: 2119501 - DNA, 15 bp, Homo sapiens
aaaactggcagaaac

SEQ ID NO: 2119502 - DNA, 15 bp, Homo sapiens
aaactggcagaaaca

SEQ ID NO: 2119503 - DNA, 15 bp, Homo sapiens
aactggcagaaacat

SEQ ID NO: 2119504 - DNA, 15 bp, Homo sapiens
actggcagaaacatt

SEQ ID NO: 2119505 - DNA, 15 bp, Homo sapiens
ctggcagaaacattt

SEQ ID NO: 2119506 - DNA, 15 bp, Homo sapiens
tggcagaaacattta

SEQ ID NO: 2119507 - DNA, 15 bp, Homo sapiens
ggcagaaacatttag

SEQ ID NO: 2119508 - DNA, 15 bp, Homo sapiens
gcagaaacatttagg

SEQ ID NO: 2119509 - DNA, 15 bp, Homo sapiens
cagaaacatttaggg

SEQ ID NO: 2119510 - DNA, 15 bp, Homo sapiens
agaaacatttagggc

SEQ ID NO: 2119511 - DNA, 15 bp, Homo sapiens
gaaacatttagggca

SEQ ID NO: 2119512 - DNA, 15 bp, Homo sapiens
aaacatttagggcag

SEQ ID NO: 2119513 - DNA, 15 bp, Homo sapiens
aacatttagggcaga

SEQ ID NO: 2119514 - DNA, 15 bp, Homo sapiens
acatttagggcagaa

SEQ ID NO: 2119515 - DNA, 15 bp, Homo sapiens
catttagggcagaag

SEQ ID NO: 2119516 - DNA, 15 bp, Homo sapiens
atttagggcagaagg

SEQ ID NO: 2119517 - DNA, 15 bp, Homo sapiens
tttagggcagaaggg

SEQ ID NO: 2119518 - DNA, 15 bp, Homo sapiens
ttagggcagaagggt

SEQ ID NO: 2119519 - DNA, 15 bp, Homo sapiens
tagggcagaagggtc

SEQ ID NO: 2119520 - DNA, 15 bp, Homo sapiens
agggcagaagggtca

SEQ ID NO: 2119521 - DNA, 15 bp, Homo sapiens
gggcagaagggtcat

SEQ ID NO: 2119522 - DNA, 15 bp, Homo sapiens
ggcagaagggtcatt

SEQ ID NO: 2119523 - DNA, 15 bp, Homo sapiens
gcagaagggtcattt

SEQ ID NO: 2119524 - DNA, 15 bp, Homo sapiens
cagaagggtcatttc

SEQ ID NO: 2119525 - DNA, 15 bp, Homo sapiens
agaagggtcatttct

SEQ ID NO: 2119526 - DNA, 15 bp, Homo sapiens
gaagggtcatttcta

SEQ ID NO: 2119527 - DNA, 15 bp, Homo sapiens
aagggtcatttctag

SEQ ID NO: 2119528 - DNA, 15 bp, Homo sapiens
agggtcatttctagt

SEQ ID NO: 2119529 - DNA, 15 bp, Homo sapiens
gggtcatttctagtt

SEQ ID NO: 2119530 - DNA, 15 bp, Homo sapiens
ggtcatttctagttt

SEQ ID NO: 2119531 - DNA, 15 bp, Homo sapiens
gtcatttctagtttc

SEQ ID NO: 2119532 - DNA, 15 bp, Homo sapiens
tcatttctagtttca

SEQ ID NO: 2119533 - DNA, 15 bp, Homo sapiens
catttctagtttcaa

SEQ ID NO: 2119534 - DNA, 15 bp, Homo sapiens
atttctagtttcaag

SEQ ID NO: 2119535 - DNA, 15 bp, Homo sapiens
tttctagtttcaaga

SEQ ID NO: 2119536 - DNA, 15 bp, Homo sapiens
ttctagtttcaagaa

SEQ ID NO: 2119537 - DNA, 15 bp, Homo sapiens
tctagtttcaagaat

SEQ ID NO: 2119538 - DNA, 15 bp, Homo sapiens
ctagtttcaagaata

SEQ ID NO: 2119539 - DNA, 15 bp, Homo sapiens
tagtttcaagaatac

SEQ ID NO: 2119540 - DNA, 15 bp, Homo sapiens
agtttcaagaatacc

SEQ ID NO: 2119541 - DNA, 15 bp, Homo sapiens
gtttcaagaataccc

SEQ ID NO: 2119542 - DNA, 15 bp, Homo sapiens
tttcaagaataccct

SEQ ID NO: 2119543 - DNA, 15 bp, Homo sapiens
ttcaagaatacccta

SEQ ID NO: 2119544 - DNA, 15 bp, Homo sapiens
tcaagaataccctac

SEQ ID NO: 2119545 - DNA, 15 bp, Homo sapiens
caagaataccctaca

SEQ ID NO: 2119546 - DNA, 15 bp, Homo sapiens
aagaataccctacag

SEQ ID NO: 2119547 - DNA, 15 bp, Homo sapiens
agaataccctacagc

SEQ ID NO: 2119548 - DNA, 15 bp, Homo sapiens
gaataccctacagct

SEQ ID NO: 2119549 - DNA, 15 bp, Homo sapiens
aataccctacagcta

SEQ ID NO: 2119550 - DNA, 15 bp, Homo sapiens
ataccctacagctaa

SEQ ID NO: 2119551 - DNA, 15 bp, Homo sapiens
taccctacagctaaa

SEQ ID NO: 2119552 - DNA, 15 bp, Homo sapiens
accctacagctaaac

SEQ ID NO: 2119553 - DNA, 15 bp, Homo sapiens
ccctacagctaaact

SEQ ID NO: 2119554 - DNA, 15 bp, Homo sapiens
cctacagctaaactc

SEQ ID NO: 2119555 - DNA, 15 bp, Homo sapiens
ctacagctaaactct

SEQ ID NO: 2119556 - DNA, 15 bp, Homo sapiens
tacagctaaactctc

SEQ ID NO: 2119557 - DNA, 15 bp, Homo sapiens
acagctaaactctcc

SEQ ID NO: 2119558 - DNA, 15 bp, Homo sapiens
cagctaaactctccc

SEQ ID NO: 2119559 - DNA, 15 bp, Homo sapiens
agctaaactctccct

SEQ ID NO: 2119560 - DNA, 15 bp, Homo sapiens
gctaaactctcccta

SEQ ID NO: 2119561 - DNA, 15 bp, Homo sapiens
ctaaactctccctaa

SEQ ID NO: 2119562 - DNA, 15 bp, Homo sapiens
taaactctccctaaa

SEQ ID NO: 2119563 - DNA, 15 bp, Homo sapiens
aaactctccctaaac

SEQ ID NO: 2119564 - DNA, 15 bp, Homo sapiens
aactctccctaaact

SEQ ID NO: 2119565 - DNA, 15 bp, Homo sapiens
actctccctaaactt

SEQ ID NO: 2119566 - DNA, 15 bp, Homo sapiens
ctctccctaaactta

SEQ ID NO: 2119567 - DNA, 15 bp, Homo sapiens
tctccctaaacttaa

SEQ ID NO: 2119568 - DNA, 15 bp, Homo sapiens
ctccctaaacttaac

SEQ ID NO: 2119569 - DNA, 15 bp, Homo sapiens
tccctaaacttaacc

SEQ ID NO: 2119570 - DNA, 15 bp, Homo sapiens
ccctaaacttaacca

SEQ ID NO: 2119571 - DNA, 15 bp, Homo sapiens
cctaaacttaaccat

SEQ ID NO: 2119572 - DNA, 15 bp, Homo sapiens
ctaaacttaaccata

SEQ ID NO: 2119573 - DNA, 15 bp, Homo sapiens
taaacttaaccatag

SEQ ID NO: 2119574 - DNA, 15 bp, Homo sapiens
aaacttaaccataga

SEQ ID NO: 2119575 - DNA, 15 bp, Homo sapiens
aacttaaccatagaa

SEQ ID NO: 2119576 - DNA, 15 bp, Homo sapiens
acttaaccatagaag

SEQ ID NO: 2119577 - DNA, 15 bp, Homo sapiens
cttaaccatagaagc

SEQ ID NO: 2119578 - DNA, 15 bp, Homo sapiens
ttaaccatagaagca

SEQ ID NO: 2119579 - DNA, 15 bp, Homo sapiens
taaccatagaagcaa

SEQ ID NO: 2119580 - DNA, 15 bp, Homo sapiens
aaccatagaagcaaa

SEQ ID NO: 2119581 - DNA, 15 bp, Homo sapiens
accatagaagcaaat

SEQ ID NO: 2119582 - DNA, 15 bp, Homo sapiens
ccatagaagcaaatg

SEQ ID NO: 2119583 - DNA, 15 bp, Homo sapiens
catagaagcaaatgt

SEQ ID NO: 2119584 - DNA, 15 bp, Homo sapiens
atagaagcaaatgtc

SEQ ID NO: 2119585 - DNA, 15 bp, Homo sapiens
tagaagcaaatgtca

SEQ ID NO: 2119586 - DNA, 15 bp, Homo sapiens
agaagcaaatgtcaa

SEQ ID NO: 2119587 - DNA, 15 bp, Homo sapiens
gaagcaaatgtcaaa

SEQ ID NO: 2119588 - DNA, 15 bp, Homo sapiens
aagcaaatgtcaaac

SEQ ID NO: 2119589 - DNA, 15 bp, Homo sapiens
agcaaatgtcaaaca

SEQ ID NO: 2119590 - DNA, 15 bp, Homo sapiens
gcaaatgtcaaacac

SEQ ID NO: 2119591 - DNA, 15 bp, Homo sapiens
caaatgtcaaacact

SEQ ID NO: 2119592 - DNA, 15 bp, Homo sapiens
aaatgtcaaacactc

SEQ ID NO: 2119593 - DNA, 15 bp, Homo sapiens
aatgtcaaacactca

SEQ ID NO: 2119594 - DNA, 15 bp, Homo sapiens
atgtcaaacactcac

SEQ ID NO: 2119595 - DNA, 15 bp, Homo sapiens
tgtcaaacactcact

SEQ ID NO: 2119596 - DNA, 15 bp, Homo sapiens
gtcaaacactcacta

SEQ ID NO: 2119597 - DNA, 15 bp, Homo sapiens
tcaaacactcactac

SEQ ID NO: 2119598 - DNA, 15 bp, Homo sapiens
caaacactcactacc

SEQ ID NO: 2119599 - DNA, 15 bp, Homo sapiens
aaacactcactaccg

SEQ ID NO: 2119600 - DNA, 15 bp, Homo sapiens
aacactcactaccgt

SEQ ID NO: 2119601 - DNA, 15 bp, Homo sapiens
acactcactaccgta

SEQ ID NO: 2119602 - DNA, 15 bp, Homo sapiens
cactcactaccgtaa

SEQ ID NO: 2119603 - DNA, 15 bp, Homo sapiens
actcactaccgtaat

SEQ ID NO: 2119604 - DNA, 15 bp, Homo sapiens
ctcactaccgtaata

SEQ ID NO: 2119605 - DNA, 15 bp, Homo sapiens
tcactaccgtaatat

SEQ ID NO: 2119606 - DNA, 15 bp, Homo sapiens
cactaccgtaatatt

SEQ ID NO: 2119607 - DNA, 15 bp, Homo sapiens
actaccgtaatatta

SEQ ID NO: 2119608 - DNA, 15 bp, Homo sapiens
ctaccgtaatattaa

SEQ ID NO: 2119609 - DNA, 15 bp, Homo sapiens
taccgtaatattaac

SEQ ID NO: 2119610 - DNA, 15 bp, Homo sapiens
accgtaatattaaca

SEQ ID NO: 2119611 - DNA, 15 bp, Homo sapiens
ccgtaatattaacag

SEQ ID NO: 2119612 - DNA, 15 bp, Homo sapiens
cgtaatattaacaga

SEQ ID NO: 2119613 - DNA, 15 bp, Homo sapiens
gtaatattaacagaa

SEQ ID NO: 2119614 - DNA, 15 bp, Homo sapiens
taatattaacagaaa

SEQ ID NO: 2119615 - DNA, 15 bp, Homo sapiens
aatattaacagaaaa

SEQ ID NO: 2119616 - DNA, 15 bp, Homo sapiens
atattaacagaaaaa

SEQ ID NO: 2119617 - DNA, 15 bp, Homo sapiens
tattaacagaaaaat

SEQ ID NO: 2119618 - DNA, 15 bp, Homo sapiens
attaacagaaaaatt

SEQ ID NO: 2119619 - DNA, 15 bp, Homo sapiens
ttaacagaaaaattt

SEQ ID NO: 2119620 - DNA, 15 bp, Homo sapiens
taacagaaaaatttc

SEQ ID NO: 2119621 - DNA, 15 bp, Homo sapiens
aacagaaaaatttcc

SEQ ID NO: 2119622 - DNA, 15 bp, Homo sapiens
acagaaaaatttccc

SEQ ID NO: 2119623 - DNA, 15 bp, Homo sapiens
cagaaaaatttccca

SEQ ID NO: 2119624 - DNA, 15 bp, Homo sapiens
agaaaaatttcccaa

SEQ ID NO: 2119625 - DNA, 15 bp, Homo sapiens
gaaaaatttcccaac

SEQ ID NO: 2119626 - DNA, 15 bp, Homo sapiens
aaaaatttcccaacc

SEQ ID NO: 2119627 - DNA, 15 bp, Homo sapiens
aaaatttcccaacca

SEQ ID NO: 2119628 - DNA, 15 bp, Homo sapiens
aaatttcccaaccaa

SEQ ID NO: 2119629 - DNA, 15 bp, Homo sapiens
aatttcccaaccaag

SEQ ID NO: 2119630 - DNA, 15 bp, Homo sapiens
atttcccaaccaagc

SEQ ID NO: 2119631 - DNA, 15 bp, Homo sapiens
tttcccaaccaagcc

SEQ ID NO: 2119632 - DNA, 15 bp, Homo sapiens
ttcccaaccaagcca

SEQ ID NO: 2119633 - DNA, 15 bp, Homo sapiens
tcccaaccaagccag

SEQ ID NO: 2119634 - DNA, 15 bp, Homo sapiens
cccaaccaagccagg

SEQ ID NO: 2119635 - DNA, 15 bp, Homo sapiens
ccaaccaagccaggt

SEQ ID NO: 2119636 - DNA, 15 bp, Homo sapiens
caaccaagccaggtt

SEQ ID NO: 2119637 - DNA, 15 bp, Homo sapiens
aaccaagccaggttt

SEQ ID NO: 2119638 - DNA, 15 bp, Homo sapiens
accaagccaggtttc

SEQ ID NO: 2119639 - DNA, 15 bp, Homo sapiens
ccaagccaggtttct

SEQ ID NO: 2119640 - DNA, 15 bp, Homo sapiens
caagccaggtttctc

SEQ ID NO: 2119641 - DNA, 15 bp, Homo sapiens
aagccaggtttctca

SEQ ID NO: 2119642 - DNA, 15 bp, Homo sapiens
agccaggtttctcac

SEQ ID NO: 2119643 - DNA, 15 bp, Homo sapiens
gccaggtttctcact

SEQ ID NO: 2119644 - DNA, 15 bp, Homo sapiens
ccaggtttctcactg

SEQ ID NO: 2119645 - DNA, 15 bp, Homo sapiens
caggtttctcactgt

SEQ ID NO: 2119646 - DNA, 15 bp, Homo sapiens
aggtttctcactgta

SEQ ID NO: 2119647 - DNA, 15 bp, Homo sapiens
ggtttctcactgtag

SEQ ID NO: 2119648 - DNA, 15 bp, Homo sapiens
gtttctcactgtaga

SEQ ID NO: 2119649 - DNA, 15 bp, Homo sapiens
tttctcactgtagaa

SEQ ID NO: 2119650 - DNA, 15 bp, Homo sapiens
ttctcactgtagaaa

SEQ ID NO: 2119651 - DNA, 15 bp, Homo sapiens
tctcactgtagaaat

SEQ ID NO: 2119652 - DNA, 15 bp, Homo sapiens
ctcactgtagaaatg

SEQ ID NO: 2119653 - DNA, 15 bp, Homo sapiens
tcactgtagaaatgg

SEQ ID NO: 2119654 - DNA, 15 bp, Homo sapiens
cactgtagaaatggg

SEQ ID NO: 2119655 - DNA, 15 bp, Homo sapiens
actgtagaaatggga

SEQ ID NO: 2119656 - DNA, 15 bp, Homo sapiens
ctgtagaaatgggag

SEQ ID NO: 2119657 - DNA, 15 bp, Homo sapiens
tgtagaaatgggagg

SEQ ID NO: 2119658 - DNA, 15 bp, Homo sapiens
gtagaaatgggaggt

SEQ ID NO: 2119659 - DNA, 15 bp, Homo sapiens
tagaaatgggaggta

SEQ ID NO: 2119660 - DNA, 15 bp, Homo sapiens
agaaatgggaggtaa

SEQ ID NO: 2119661 - DNA, 15 bp, Homo sapiens
gaaatgggaggtaac

SEQ ID NO: 2119662 - DNA, 15 bp, Homo sapiens
aaatgggaggtaaca

SEQ ID NO: 2119663 - DNA, 15 bp, Homo sapiens
aatgggaggtaacag

SEQ ID NO: 2119664 - DNA, 15 bp, Homo sapiens
atgggaggtaacaga

SEQ ID NO: 2119665 - DNA, 15 bp, Homo sapiens
tgggaggtaacagat

SEQ ID NO: 2119666 - DNA, 15 bp, Homo sapiens
gggaggtaacagata

SEQ ID NO: 2119667 - DNA, 15 bp, Homo sapiens
ggaggtaacagataa

SEQ ID NO: 2119668 - DNA, 15 bp, Homo sapiens
gaggtaacagataag

SEQ ID NO: 2119669 - DNA, 15 bp, Homo sapiens
aggtaacagataagc

SEQ ID NO: 2119670 - DNA, 15 bp, Homo sapiens
ggtaacagataagca

SEQ ID NO: 2119671 - DNA, 15 bp, Homo sapiens
gtaacagataagcaa

SEQ ID NO: 2119672 - DNA, 15 bp, Homo sapiens
taacagataagcaag

SEQ ID NO: 2119673 - DNA, 15 bp, Homo sapiens
aacagataagcaagg

SEQ ID NO: 2119674 - DNA, 15 bp, Homo sapiens
acagataagcaagga

SEQ ID NO: 2119675 - DNA, 15 bp, Homo sapiens
cagataagcaaggag

SEQ ID NO: 2119676 - DNA, 15 bp, Homo sapiens
agataagcaaggagg

SEQ ID NO: 2119677 - DNA, 15 bp, Homo sapiens
gataagcaaggaggt

SEQ ID NO: 2119678 - DNA, 15 bp, Homo sapiens
ataagcaaggaggtg

SEQ ID NO: 2119679 - DNA, 15 bp, Homo sapiens
taagcaaggaggtga

SEQ ID NO: 2119680 - DNA, 15 bp, Homo sapiens
aagcaaggaggtgag

SEQ ID NO: 2119681 - DNA, 15 bp, Homo sapiens
agcaaggaggtgaga

SEQ ID NO: 2119682 - DNA, 15 bp, Homo sapiens
gcaaggaggtgagac

SEQ ID NO: 2119683 - DNA, 15 bp, Homo sapiens
caaggaggtgagact

SEQ ID NO: 2119684 - DNA, 15 bp, Homo sapiens
aaggaggtgagacta

SEQ ID NO: 2119685 - DNA, 15 bp, Homo sapiens
aggaggtgagactat

SEQ ID NO: 2119686 - DNA, 15 bp, Homo sapiens
ggaggtgagactata

SEQ ID NO: 2119687 - DNA, 15 bp, Homo sapiens
gaggtgagactataa

SEQ ID NO: 2119688 - DNA, 15 bp, Homo sapiens
aggtgagactataat

SEQ ID NO: 2119689 - DNA, 15 bp, Homo sapiens
ggtgagactataatg

SEQ ID NO: 2119690 - DNA, 15 bp, Homo sapiens
gtgagactataatga

SEQ ID NO: 2119691 - DNA, 15 bp, Homo sapiens
tgagactataatgat

SEQ ID NO: 2119692 - DNA, 15 bp, Homo sapiens
gagactataatgatc

SEQ ID NO: 2119693 - DNA, 15 bp, Homo sapiens
agactataatgatcc

SEQ ID NO: 2119694 - DNA, 15 bp, Homo sapiens
gactataatgatcca

SEQ ID NO: 2119695 - DNA, 15 bp, Homo sapiens
actataatgatccat

SEQ ID NO: 2119696 - DNA, 15 bp, Homo sapiens
ctataatgatccatg

SEQ ID NO: 2119697 - DNA, 15 bp, Homo sapiens
tataatgatccatgt

SEQ ID NO: 2119698 - DNA, 15 bp, Homo sapiens
ataatgatccatgtg

SEQ ID NO: 2119699 - DNA, 15 bp, Homo sapiens
taatgatccatgtgg

SEQ ID NO: 2119700 - DNA, 15 bp, Homo sapiens
aatgatccatgtggc

SEQ ID NO: 2119701 - DNA, 15 bp, Homo sapiens
atgatccatgtggca

SEQ ID NO: 2119702 - DNA, 15 bp, Homo sapiens
tgatccatgtggcaa

SEQ ID NO: 2119703 - DNA, 15 bp, Homo sapiens
gatccatgtggcaat

SEQ ID NO: 2119704 - DNA, 15 bp, Homo sapiens
atccatgtggcaatg

SEQ ID NO: 2119705 - DNA, 15 bp, Homo sapiens
tccatgtggcaatga

SEQ ID NO: 2119706 - DNA, 15 bp, Homo sapiens
ccatgtggcaatgat

SEQ ID NO: 2119707 - DNA, 15 bp, Homo sapiens
catgtggcaatgatt

SEQ ID NO: 2119708 - DNA, 15 bp, Homo sapiens
atgtggcaatgatta

SEQ ID NO: 2119709 - DNA, 15 bp, Homo sapiens
tgtggcaatgattag

SEQ ID NO: 2119710 - DNA, 15 bp, Homo sapiens
gtggcaatgattaga

SEQ ID NO: 2119711 - DNA, 15 bp, Homo sapiens
tggcaatgattagag

SEQ ID NO: 2119712 - DNA, 15 bp, Homo sapiens
ggcaatgattagagt

SEQ ID NO: 2119713 - DNA, 15 bp, Homo sapiens
gcaatgattagagtt

SEQ ID NO: 2119714 - DNA, 15 bp, Homo sapiens
caatgattagagttg

SEQ ID NO: 2119715 - DNA, 15 bp, Homo sapiens
aatgattagagttgg

SEQ ID NO: 2119716 - DNA, 15 bp, Homo sapiens
atgattagagttgga

SEQ ID NO: 2119717 - DNA, 15 bp, Homo sapiens
tgattagagttggag

SEQ ID NO: 2119718 - DNA, 15 bp, Homo sapiens
gattagagttggaga

SEQ ID NO: 2119719 - DNA, 15 bp, Homo sapiens
attagagttggagac

SEQ ID NO: 2119720 - DNA, 15 bp, Homo sapiens
ttagagttggagacg

SEQ ID NO: 2119721 - DNA, 15 bp, Homo sapiens
tagagttggagacgt

SEQ ID NO: 2119722 - DNA, 15 bp, Homo sapiens
agagttggagacgta

SEQ ID NO: 2119723 - DNA, 15 bp, Homo sapiens
gagttggagacgtag

SEQ ID NO: 2119724 - DNA, 15 bp, Homo sapiens
agttggagacgtagg

SEQ ID NO: 2119725 - DNA, 15 bp, Homo sapiens
gttggagacgtaggt

SEQ ID NO: 2119726 - DNA, 15 bp, Homo sapiens
ttggagacgtaggta

SEQ ID NO: 2119727 - DNA, 15 bp, Homo sapiens
tggagacgtaggtat

SEQ ID NO: 2119728 - DNA, 15 bp, Homo sapiens
ggagacgtaggtata

SEQ ID NO: 2119729 - DNA, 15 bp, Homo sapiens
gagacgtaggtataa

SEQ ID NO: 2119730 - DNA, 15 bp, Homo sapiens
agacgtaggtataaa

SEQ ID NO: 2119731 - DNA, 15 bp, Homo sapiens
gacgtaggtataaac

SEQ ID NO: 2119732 - DNA, 15 bp, Homo sapiens
acgtaggtataaaca

SEQ ID NO: 2119733 - DNA, 15 bp, Homo sapiens
cgtaggtataaacac

SEQ ID NO: 2119734 - DNA, 15 bp, Homo sapiens
gtaggtataaacaca

SEQ ID NO: 2119735 - DNA, 15 bp, Homo sapiens
taggtataaacacat

SEQ ID NO: 2119736 - DNA, 15 bp, Homo sapiens
aggtataaacacatt

SEQ ID NO: 2119737 - DNA, 15 bp, Homo sapiens
ggtataaacacattt

SEQ ID NO: 2119738 - DNA, 15 bp, Homo sapiens
gtataaacacattta

SEQ ID NO: 2119739 - DNA, 15 bp, Homo sapiens
tataaacacatttag

SEQ ID NO: 2119740 - DNA, 15 bp, Homo sapiens
ataaacacatttagt

SEQ ID NO: 2119741 - DNA, 15 bp, Homo sapiens
taaacacatttagtt

SEQ ID NO: 2119742 - DNA, 15 bp, Homo sapiens
aaacacatttagttt

SEQ ID NO: 2119743 - DNA, 15 bp, Homo sapiens
aacacatttagttta

SEQ ID NO: 2119744 - DNA, 15 bp, Homo sapiens
acacatttagtttaa

SEQ ID NO: 2119745 - DNA, 15 bp, Homo sapiens
cacatttagtttaat

SEQ ID NO: 2119746 - DNA, 15 bp, Homo sapiens
acatttagtttaata

SEQ ID NO: 2119747 - DNA, 15 bp, Homo sapiens
catttagtttaatat

SEQ ID NO: 2119748 - DNA, 15 bp, Homo sapiens
atttagtttaatata

SEQ ID NO: 2119749 - DNA, 15 bp, Homo sapiens
tttagtttaatatag

SEQ ID NO: 2119750 - DNA, 15 bp, Homo sapiens
ttagtttaatataga

SEQ ID NO: 2119751 - DNA, 15 bp, Homo sapiens
tagtttaatatagat

SEQ ID NO: 2119752 - DNA, 15 bp, Homo sapiens
agtttaatatagata

SEQ ID NO: 2119753 - DNA, 15 bp, Homo sapiens
gtttaatatagatac

SEQ ID NO: 2119754 - DNA, 15 bp, Homo sapiens
tttaatatagataca

SEQ ID NO: 2119755 - DNA, 15 bp, Homo sapiens
ttaatatagatacag

SEQ ID NO: 2119756 - DNA, 15 bp, Homo sapiens
taatatagatacaga

SEQ ID NO: 2119757 - DNA, 15 bp, Homo sapiens
aatatagatacagat

SEQ ID NO: 2119758 - DNA, 15 bp, Homo sapiens
atatagatacagatg

SEQ ID NO: 2119759 - DNA, 15 bp, Homo sapiens
tatagatacagatgg

SEQ ID NO: 2119760 - DNA, 15 bp, Homo sapiens
atagatacagatggt

SEQ ID NO: 2119761 - DNA, 15 bp, Homo sapiens
tagatacagatggtt

SEQ ID NO: 2119762 - DNA, 15 bp, Homo sapiens
agatacagatggtta

SEQ ID NO: 2119763 - DNA, 15 bp, Homo sapiens
gatacagatggttat

SEQ ID NO: 2119764 - DNA, 15 bp, Homo sapiens
atacagatggttata

SEQ ID NO: 2119765 - DNA, 15 bp, Homo sapiens
tacagatggttatat

SEQ ID NO: 2119766 - DNA, 15 bp, Homo sapiens
acagatggttatata

SEQ ID NO: 2119767 - DNA, 15 bp, Homo sapiens
cagatggttatatat

SEQ ID NO: 2119768 - DNA, 15 bp, Homo sapiens
agatggttatatata

SEQ ID NO: 2119769 - DNA, 15 bp, Homo sapiens
gatggttatatatat

SEQ ID NO: 2119770 - DNA, 15 bp, Homo sapiens
atggttatatatatt

SEQ ID NO: 2119771 - DNA, 15 bp, Homo sapiens
tggttatatatattt

SEQ ID NO: 2119772 - DNA, 15 bp, Homo sapiens
ggttatatatattta

SEQ ID NO: 2119773 - DNA, 15 bp, Homo sapiens
gttatatatatttat

SEQ ID NO: 2119774 - DNA, 15 bp, Homo sapiens
ttatatatatttata

SEQ ID NO: 2119775 - DNA, 15 bp, Homo sapiens
tatatatatttatag

SEQ ID NO: 2119776 - DNA, 15 bp, Homo sapiens
atatatatttatagc

SEQ ID NO: 2119777 - DNA, 15 bp, Homo sapiens
tatatatttatagct

SEQ ID NO: 2119778 - DNA, 15 bp, Homo sapiens
atatatttatagcta

SEQ ID NO: 2119779 - DNA, 15 bp, Homo sapiens
tatatttatagctat

SEQ ID NO: 2119780 - DNA, 15 bp, Homo sapiens
atatttatagctatg

SEQ ID NO: 2119781 - DNA, 15 bp, Homo sapiens
tatttatagctatgt

SEQ ID NO: 2119782 - DNA, 15 bp, Homo sapiens
atttatagctatgtg

SEQ ID NO: 2119783 - DNA, 15 bp, Homo sapiens
tttatagctatgtgc

SEQ ID NO: 2119784 - DNA, 15 bp, Homo sapiens
ttatagctatgtgca

SEQ ID NO: 2119785 - DNA, 15 bp, Homo sapiens
tatagctatgtgcat

SEQ ID NO: 2119786 - DNA, 15 bp, Homo sapiens
atagctatgtgcata

SEQ ID NO: 2119787 - DNA, 15 bp, Homo sapiens
tagctatgtgcatat

SEQ ID NO: 2119788 - DNA, 15 bp, Homo sapiens
agctatgtgcatata

SEQ ID NO: 2119789 - DNA, 15 bp, Homo sapiens
gctatgtgcatatac

SEQ ID NO: 2119790 - DNA, 15 bp, Homo sapiens
ctatgtgcatataca

SEQ ID NO: 2119791 - DNA, 15 bp, Homo sapiens
tatgtgcatatacac

SEQ ID NO: 2119792 - DNA, 15 bp, Homo sapiens
atgtgcatatacaca

SEQ ID NO: 2119793 - DNA, 15 bp, Homo sapiens
tgtgcatatacacac

SEQ ID NO: 2119794 - DNA, 15 bp, Homo sapiens
gtgcatatacacacg

SEQ ID NO: 2119795 - DNA, 15 bp, Homo sapiens
tgcatatacacacgt

SEQ ID NO: 2119796 - DNA, 15 bp, Homo sapiens
gcatatacacacgtt

SEQ ID NO: 2119797 - DNA, 15 bp, Homo sapiens
catatacacacgtta

SEQ ID NO: 2119798 - DNA, 15 bp, Homo sapiens
atatacacacgttag

SEQ ID NO: 2119799 - DNA, 15 bp, Homo sapiens
tatacacacgttaga

SEQ ID NO: 2119800 - DNA, 15 bp, Homo sapiens
atacacacgttagaa

SEQ ID NO: 2119801 - DNA, 15 bp, Homo sapiens
tacacacgttagaat

SEQ ID NO: 2119802 - DNA, 15 bp, Homo sapiens
acacacgttagaatg

SEQ ID NO: 2119803 - DNA, 15 bp, Homo sapiens
cacacgttagaatgc

SEQ ID NO: 2119804 - DNA, 15 bp, Homo sapiens
acacgttagaatgca

SEQ ID NO: 2119805 - DNA, 15 bp, Homo sapiens
cacgttagaatgcaa

SEQ ID NO: 2119806 - DNA, 15 bp, Homo sapiens
acgttagaatgcaaa

SEQ ID NO: 2119807 - DNA, 15 bp, Homo sapiens
cgttagaatgcaaat

SEQ ID NO: 2119808 - DNA, 15 bp, Homo sapiens
gttagaatgcaaata

SEQ ID NO: 2119809 - DNA, 15 bp, Homo sapiens
ttagaatgcaaatat

SEQ ID NO: 2119810 - DNA, 15 bp, Homo sapiens
tagaatgcaaatata

SEQ ID NO: 2119811 - DNA, 15 bp, Homo sapiens
agaatgcaaatatat

SEQ ID NO: 2119812 - DNA, 15 bp, Homo sapiens
gaatgcaaatatata

SEQ ID NO: 2119813 - DNA, 15 bp, Homo sapiens
aatgcaaatatatat

SEQ ID NO: 2119814 - DNA, 15 bp, Homo sapiens
atgcaaatatatatc

SEQ ID NO: 2119815 - DNA, 15 bp, Homo sapiens
tgcaaatatatatct

SEQ ID NO: 2119816 - DNA, 15 bp, Homo sapiens
gcaaatatatatctc

SEQ ID NO: 2119817 - DNA, 15 bp, Homo sapiens
caaatatatatctcc

SEQ ID NO: 2119818 - DNA, 15 bp, Homo sapiens
aaatatatatctcct

SEQ ID NO: 2119819 - DNA, 15 bp, Homo sapiens
aatatatatctcctt

SEQ ID NO: 2119820 - DNA, 15 bp, Homo sapiens
atatatatctccttg

SEQ ID NO: 2119821 - DNA, 15 bp, Homo sapiens
tatatatctccttgc

SEQ ID NO: 2119822 - DNA, 15 bp, Homo sapiens
atatatctccttgct

SEQ ID NO: 2119823 - DNA, 15 bp, Homo sapiens
tatatctccttgctc

SEQ ID NO: 2119824 - DNA, 15 bp, Homo sapiens
atatctccttgctct

SEQ ID NO: 2119825 - DNA, 15 bp, Homo sapiens
tatctccttgctctt

SEQ ID NO: 2119826 - DNA, 15 bp, Homo sapiens
atctccttgctcttg

SEQ ID NO: 2119827 - DNA, 15 bp, Homo sapiens
tctccttgctcttgt

SEQ ID NO: 2119828 - DNA, 15 bp, Homo sapiens
ctccttgctcttgtc

SEQ ID NO: 2119829 - DNA, 15 bp, Homo sapiens
tccttgctcttgtca

SEQ ID NO: 2119830 - DNA, 15 bp, Homo sapiens
ccttgctcttgtcaa

SEQ ID NO: 2119831 - DNA, 15 bp, Homo sapiens
cttgctcttgtcaac

SEQ ID NO: 2119832 - DNA, 15 bp, Homo sapiens
ttgctcttgtcaact

SEQ ID NO: 2119833 - DNA, 15 bp, Homo sapiens
tgctcttgtcaactg

SEQ ID NO: 2119834 - DNA, 15 bp, Homo sapiens
gctcttgtcaactga

SEQ ID NO: 2119835 - DNA, 15 bp, Homo sapiens
ctcttgtcaactgaa

SEQ ID NO: 2119836 - DNA, 15 bp, Homo sapiens
tcttgtcaactgaaa

SEQ ID NO: 2119837 - DNA, 15 bp, Homo sapiens
cttgtcaactgaaaa

SEQ ID NO: 2119838 - DNA, 15 bp, Homo sapiens
ttgtcaactgaaaag

SEQ ID NO: 2119839 - DNA, 15 bp, Homo sapiens
tgtcaactgaaaagg

SEQ ID NO: 2119840 - DNA, 15 bp, Homo sapiens
gtcaactgaaaaggt

SEQ ID NO: 2119841 - DNA, 15 bp, Homo sapiens
tcaactgaaaaggtc

SEQ ID NO: 2119842 - DNA, 15 bp, Homo sapiens
caactgaaaaggtct

SEQ ID NO: 2119843 - DNA, 15 bp, Homo sapiens
aactgaaaaggtctt

SEQ ID NO: 2119844 - DNA, 15 bp, Homo sapiens
actgaaaaggtcttg

SEQ ID NO: 2119845 - DNA, 15 bp, Homo sapiens
ctgaaaaggtcttga

SEQ ID NO: 2119846 - DNA, 15 bp, Homo sapiens
tgaaaaggtcttgaa

SEQ ID NO: 2119847 - DNA, 15 bp, Homo sapiens
gaaaaggtcttgaag

SEQ ID NO: 2119848 - DNA, 15 bp, Homo sapiens
aaaaggtcttgaagg

SEQ ID NO: 2119849 - DNA, 15 bp, Homo sapiens
aaaggtcttgaagga

SEQ ID NO: 2119850 - DNA, 15 bp, Homo sapiens
aaggtcttgaaggaa

SEQ ID NO: 2119851 - DNA, 15 bp, Homo sapiens
aggtcttgaaggaat

SEQ ID NO: 2119852 - DNA, 15 bp, Homo sapiens
ggtcttgaaggaatg

SEQ ID NO: 2119853 - DNA, 15 bp, Homo sapiens
gtcttgaaggaatga

SEQ ID NO: 2119854 - DNA, 15 bp, Homo sapiens
tcttgaaggaatgac

SEQ ID NO: 2119855 - DNA, 15 bp, Homo sapiens
cttgaaggaatgaca

SEQ ID NO: 2119856 - DNA, 15 bp, Homo sapiens
ttgaaggaatgacac

SEQ ID NO: 2119857 - DNA, 15 bp, Homo sapiens
tgaaggaatgacact

SEQ ID NO: 2119858 - DNA, 15 bp, Homo sapiens
gaaggaatgacactc

SEQ ID NO: 2119859 - DNA, 15 bp, Homo sapiens
aaggaatgacactcc

SEQ ID NO: 2119860 - DNA, 15 bp, Homo sapiens
aggaatgacactcca

SEQ ID NO: 2119861 - DNA, 15 bp, Homo sapiens
ggaatgacactccag

SEQ ID NO: 2119862 - DNA, 15 bp, Homo sapiens
gaatgacactccagt

SEQ ID NO: 2119863 - DNA, 15 bp, Homo sapiens
aatgacactccagta

SEQ ID NO: 2119864 - DNA, 15 bp, Homo sapiens
atgacactccagtag

SEQ ID NO: 2119865 - DNA, 15 bp, Homo sapiens
tgacactccagtagt

SEQ ID NO: 2119866 - DNA, 15 bp, Homo sapiens
gacactccagtagta

SEQ ID NO: 2119867 - DNA, 15 bp, Homo sapiens
acactccagtagtaa

SEQ ID NO: 2119868 - DNA, 15 bp, Homo sapiens
cactccagtagtaat

SEQ ID NO: 2119869 - DNA, 15 bp, Homo sapiens
actccagtagtaatg

SEQ ID NO: 2119870 - DNA, 15 bp, Homo sapiens
ctccagtagtaatga

SEQ ID NO: 2119871 - DNA, 15 bp, Homo sapiens
tccagtagtaatgag

SEQ ID NO: 2119872 - DNA, 15 bp, Homo sapiens
ccagtagtaatgagc

SEQ ID NO: 2119873 - DNA, 15 bp, Homo sapiens
cagtagtaatgagcg

SEQ ID NO: 2119874 - DNA, 15 bp, Homo sapiens
agtagtaatgagcgc

SEQ ID NO: 2119875 - DNA, 15 bp, Homo sapiens
gtagtaatgagcgca

SEQ ID NO: 2119876 - DNA, 15 bp, Homo sapiens
tagtaatgagcgcac

SEQ ID NO: 2119877 - DNA, 15 bp, Homo sapiens
agtaatgagcgcacc

SEQ ID NO: 2119878 - DNA, 15 bp, Homo sapiens
gtaatgagcgcacct

SEQ ID NO: 2119879 - DNA, 15 bp, Homo sapiens
taatgagcgcaccta

SEQ ID NO: 2119880 - DNA, 15 bp, Homo sapiens
aatgagcgcacctag

SEQ ID NO: 2119881 - DNA, 15 bp, Homo sapiens
atgagcgcacctagc

SEQ ID NO: 2119882 - DNA, 15 bp, Homo sapiens
tgagcgcacctagca

SEQ ID NO: 2119883 - DNA, 15 bp, Homo sapiens
gagcgcacctagcat

SEQ ID NO: 2119884 - DNA, 15 bp, Homo sapiens
agcgcacctagcatt

SEQ ID NO: 2119885 - DNA, 15 bp, Homo sapiens
gcgcacctagcattc

SEQ ID NO: 2119886 - DNA, 15 bp, Homo sapiens
cgcacctagcattca

SEQ ID NO: 2119887 - DNA, 15 bp, Homo sapiens
gcacctagcattcac

SEQ ID NO: 2119888 - DNA, 15 bp, Homo sapiens
cacctagcattcact

SEQ ID NO: 2119889 - DNA, 15 bp, Homo sapiens
acctagcattcactt

SEQ ID NO: 2119890 - DNA, 15 bp, Homo sapiens
cctagcattcacttc

SEQ ID NO: 2119891 - DNA, 15 bp, Homo sapiens
ctagcattcacttct

SEQ ID NO: 2119892 - DNA, 15 bp, Homo sapiens
tagcattcacttctt

SEQ ID NO: 2119893 - DNA, 15 bp, Homo sapiens
agcattcacttcttg

SEQ ID NO: 2119894 - DNA, 15 bp, Homo sapiens
gcattcacttcttga

SEQ ID NO: 2119895 - DNA, 15 bp, Homo sapiens
cattcacttcttgat

SEQ ID NO: 2119896 - DNA, 15 bp, Homo sapiens
attcacttcttgatt

SEQ ID NO: 2119897 - DNA, 15 bp, Homo sapiens
ttcacttcttgattt

SEQ ID NO: 2119898 - DNA, 15 bp, Homo sapiens
tcacttcttgatttc

SEQ ID NO: 2119899 - DNA, 15 bp, Homo sapiens
cacttcttgatttct

SEQ ID NO: 2119900 - DNA, 15 bp, Homo sapiens
acttcttgatttcta

SEQ ID NO: 2119901 - DNA, 15 bp, Homo sapiens
cttcttgatttctaa

SEQ ID NO: 2119902 - DNA, 15 bp, Homo sapiens
ttcttgatttctaat

SEQ ID NO: 2119903 - DNA, 15 bp, Homo sapiens
tcttgatttctaata

SEQ ID NO: 2119904 - DNA, 15 bp, Homo sapiens
cttgatttctaatat

SEQ ID NO: 2119905 - DNA, 15 bp, Homo sapiens
ttgatttctaatatt

SEQ ID NO: 2119906 - DNA, 15 bp, Homo sapiens
tgatttctaatatta

SEQ ID NO: 2119907 - DNA, 15 bp, Homo sapiens
gatttctaatattac

SEQ ID NO: 2119908 - DNA, 15 bp, Homo sapiens
atttctaatattact

SEQ ID NO: 2119909 - DNA, 15 bp, Homo sapiens
tttctaatattactc

SEQ ID NO: 2119910 - DNA, 15 bp, Homo sapiens
ttctaatattactct

SEQ ID NO: 2119911 - DNA, 15 bp, Homo sapiens
tctaatattactctc

SEQ ID NO: 2119912 - DNA, 15 bp, Homo sapiens
ctaatattactctcc

SEQ ID NO: 2119913 - DNA, 15 bp, Homo sapiens
taatattactctcca

SEQ ID NO: 2119914 - DNA, 15 bp, Homo sapiens
aatattactctccaa

SEQ ID NO: 2119915 - DNA, 15 bp, Homo sapiens
atattactctccaat

SEQ ID NO: 2119916 - DNA, 15 bp, Homo sapiens
tattactctccaata

SEQ ID NO: 2119917 - DNA, 15 bp, Homo sapiens
attactctccaataa

SEQ ID NO: 2119918 - DNA, 15 bp, Homo sapiens
ttactctccaataaa

SEQ ID NO: 2119919 - DNA, 15 bp, Homo sapiens
tactctccaataaaa

SEQ ID NO: 2119920 - DNA, 15 bp, Homo sapiens
actctccaataaaaa

SEQ ID NO: 2119921 - DNA, 15 bp, Homo sapiens
ctctccaataaaaag

SEQ ID NO: 2119922 - DNA, 15 bp, Homo sapiens
tctccaataaaaagt

SEQ ID NO: 2119923 - DNA, 15 bp, Homo sapiens
ctccaataaaaagta

SEQ ID NO: 2119924 - DNA, 15 bp, Homo sapiens
tccaataaaaagtat

SEQ ID NO: 2119925 - DNA, 15 bp, Homo sapiens
ccaataaaaagtatc

SEQ ID NO: 2119926 - DNA, 15 bp, Homo sapiens
caataaaaagtatca

SEQ ID NO: 2119927 - DNA, 15 bp, Homo sapiens
aataaaaagtatcaa

SEQ ID NO: 2119928 - DNA, 15 bp, Homo sapiens
ataaaaagtatcaag

SEQ ID NO: 2119929 - DNA, 15 bp, Homo sapiens
taaaaagtatcaagg

SEQ ID NO: 2119930 - DNA, 15 bp, Homo sapiens
aaaaagtatcaaggc

SEQ ID NO: 2119931 - DNA, 15 bp, Homo sapiens
aaaagtatcaaggct

SEQ ID NO: 2119932 - DNA, 15 bp, Homo sapiens
aaagtatcaaggctc

SEQ ID NO: 2119933 - DNA, 15 bp, Homo sapiens
aagtatcaaggctcc

SEQ ID NO: 2119934 - DNA, 15 bp, Homo sapiens
agtatcaaggctcct

SEQ ID NO: 2119935 - DNA, 15 bp, Homo sapiens
gtatcaaggctcctt

SEQ ID NO: 2119936 - DNA, 15 bp, Homo sapiens
tatcaaggctccttg

SEQ ID NO: 2119937 - DNA, 15 bp, Homo sapiens
atcaaggctccttgc

SEQ ID NO: 2119938 - DNA, 15 bp, Homo sapiens
tcaaggctccttgca

SEQ ID NO: 2119939 - DNA, 15 bp, Homo sapiens
caaggctccttgcag

SEQ ID NO: 2119940 - DNA, 15 bp, Homo sapiens
aaggctccttgcaga

SEQ ID NO: 2119941 - DNA, 15 bp, Homo sapiens
aggctccttgcagaa

SEQ ID NO: 2119942 - DNA, 15 bp, Homo sapiens
ggctccttgcagaaa

SEQ ID NO: 2119943 - DNA, 15 bp, Homo sapiens
gctccttgcagaaat

SEQ ID NO: 2119944 - DNA, 15 bp, Homo sapiens
ctccttgcagaaata

SEQ ID NO: 2119945 - DNA, 15 bp, Homo sapiens
tccttgcagaaatac

SEQ ID NO: 2119946 - DNA, 15 bp, Homo sapiens
ccttgcagaaataca

SEQ ID NO: 2119947 - DNA, 15 bp, Homo sapiens
cttgcagaaatacat

SEQ ID NO: 2119948 - DNA, 15 bp, Homo sapiens
ttgcagaaatacatc

SEQ ID NO: 2119949 - DNA, 15 bp, Homo sapiens
tgcagaaatacatca

SEQ ID NO: 2119950 - DNA, 15 bp, Homo sapiens
gcagaaatacatcat

SEQ ID NO: 2119951 - DNA, 15 bp, Homo sapiens
cagaaatacatcatt

SEQ ID NO: 2119952 - DNA, 15 bp, Homo sapiens
agaaatacatcattt

SEQ ID NO: 2119953 - DNA, 15 bp, Homo sapiens
gaaatacatcatttt

SEQ ID NO: 2119954 - DNA, 15 bp, Homo sapiens
aaatacatcatttta

SEQ ID NO: 2119955 - DNA, 15 bp, Homo sapiens
aatacatcattttag

SEQ ID NO: 2119956 - DNA, 15 bp, Homo sapiens
atacatcattttagg

SEQ ID NO: 2119957 - DNA, 15 bp, Homo sapiens
tacatcattttaggt

SEQ ID NO: 2119958 - DNA, 15 bp, Homo sapiens
acatcattttaggtc

SEQ ID NO: 2119959 - DNA, 15 bp, Homo sapiens
catcattttaggtcc

SEQ ID NO: 2119960 - DNA, 15 bp, Homo sapiens
atcattttaggtcca

SEQ ID NO: 2119961 - DNA, 15 bp, Homo sapiens
tcattttaggtccag

SEQ ID NO: 2119962 - DNA, 15 bp, Homo sapiens
cattttaggtccagg

SEQ ID NO: 2119963 - DNA, 15 bp, Homo sapiens
attttaggtccaggc

SEQ ID NO: 2119964 - DNA, 15 bp, Homo sapiens
ttttaggtccaggca

SEQ ID NO: 2119965 - DNA, 15 bp, Homo sapiens
tttaggtccaggcag

SEQ ID NO: 2119966 - DNA, 15 bp, Homo sapiens
ttaggtccaggcagg

SEQ ID NO: 2119967 - DNA, 15 bp, Homo sapiens
taggtccaggcagga

SEQ ID NO: 2119968 - DNA, 15 bp, Homo sapiens
aggtccaggcaggag

SEQ ID NO: 2119969 - DNA, 15 bp, Homo sapiens
ggtccaggcaggaga

SEQ ID NO: 2119970 - DNA, 15 bp, Homo sapiens
gtccaggcaggagat

SEQ ID NO: 2119971 - DNA, 15 bp, Homo sapiens
tccaggcaggagata

SEQ ID NO: 2119972 - DNA, 15 bp, Homo sapiens
ccaggcaggagatat

SEQ ID NO: 2119973 - DNA, 15 bp, Homo sapiens
caggcaggagatatg

SEQ ID NO: 2119974 - DNA, 15 bp, Homo sapiens
aggcaggagatatgc

SEQ ID NO: 2119975 - DNA, 15 bp, Homo sapiens
ggcaggagatatgca

SEQ ID NO: 2119976 - DNA, 15 bp, Homo sapiens
gcaggagatatgcaa

SEQ ID NO: 2119977 - DNA, 15 bp, Homo sapiens
caggagatatgcaaa

SEQ ID NO: 2119978 - DNA, 15 bp, Homo sapiens
aggagatatgcaaat

SEQ ID NO: 2119979 - DNA, 15 bp, Homo sapiens
ggagatatgcaaatg

SEQ ID NO: 2119980 - DNA, 15 bp, Homo sapiens
gagatatgcaaatga

SEQ ID NO: 2119981 - DNA, 15 bp, Homo sapiens
agatatgcaaatgag

SEQ ID NO: 2119982 - DNA, 15 bp, Homo sapiens
gatatgcaaatgagt

SEQ ID NO: 2119983 - DNA, 15 bp, Homo sapiens
atatgcaaatgagtc

SEQ ID NO: 2119984 - DNA, 15 bp, Homo sapiens
tatgcaaatgagtct

SEQ ID NO: 2119985 - DNA, 15 bp, Homo sapiens
atgcaaatgagtctg

SEQ ID NO: 2119986 - DNA, 15 bp, Homo sapiens
tgcaaatgagtctga

SEQ ID NO: 2119987 - DNA, 15 bp, Homo sapiens
gcaaatgagtctgaa

SEQ ID NO: 2119988 - DNA, 15 bp, Homo sapiens
caaatgagtctgaag

SEQ ID NO: 2119989 - DNA, 15 bp, Homo sapiens
aaatgagtctgaagc

SEQ ID NO: 2119990 - DNA, 15 bp, Homo sapiens
aatgagtctgaagca

SEQ ID NO: 2119991 - DNA, 15 bp, Homo sapiens
atgagtctgaagcat

SEQ ID NO: 2119992 - DNA, 15 bp, Homo sapiens
tgagtctgaagcatg

SEQ ID NO: 2119993 - DNA, 15 bp, Homo sapiens
gagtctgaagcatgt

SEQ ID NO: 2119994 - DNA, 15 bp, Homo sapiens
agtctgaagcatgtt

SEQ ID NO: 2119995 - DNA, 15 bp, Homo sapiens
gtctgaagcatgttg

SEQ ID NO: 2119996 - DNA, 15 bp, Homo sapiens
tctgaagcatgttgt

SEQ ID NO: 2119997 - DNA, 15 bp, Homo sapiens
ctgaagcatgttgta

SEQ ID NO: 2119998 - DNA, 15 bp, Homo sapiens
tgaagcatgttgtag

SEQ ID NO: 2119999 - DNA, 15 bp, Homo sapiens
gaagcatgttgtagt

SEQ ID NO: 2120000 - DNA, 15 bp, Homo sapiens
aagcatgttgtagtt

SEQ ID NO: 2120001 - DNA, 15 bp, Homo sapiens
agcatgttgtagttc

SEQ ID NO: 2120002 - DNA, 15 bp, Homo sapiens
gcatgttgtagttcc

SEQ ID NO: 2120003 - DNA, 15 bp, Homo sapiens
catgttgtagttcca

SEQ ID NO: 2120004 - DNA, 15 bp, Homo sapiens
atgttgtagttccaa

SEQ ID NO: 2120005 - DNA, 15 bp, Homo sapiens
tgttgtagttccaaa

SEQ ID NO: 2120006 - DNA, 15 bp, Homo sapiens
gttgtagttccaaaa

SEQ ID NO: 2120007 - DNA, 15 bp, Homo sapiens
ttgtagttccaaaaa

SEQ ID NO: 2120008 - DNA, 15 bp, Homo sapiens
tgtagttccaaaaat

SEQ ID NO: 2120009 - DNA, 15 bp, Homo sapiens
gtagttccaaaaata

SEQ ID NO: 2120010 - DNA, 15 bp, Homo sapiens
tagttccaaaaataa

SEQ ID NO: 2120011 - DNA, 15 bp, Homo sapiens
agttccaaaaataag

SEQ ID NO: 2120012 - DNA, 15 bp, Homo sapiens
gttccaaaaataaga

SEQ ID NO: 2120013 - DNA, 15 bp, Homo sapiens
ttccaaaaataagaa

SEQ ID NO: 2120014 - DNA, 15 bp, Homo sapiens
tccaaaaataagaaa

SEQ ID NO: 2120015 - DNA, 15 bp, Homo sapiens
ccaaaaataagaaag

SEQ ID NO: 2120016 - DNA, 15 bp, Homo sapiens
caaaaataagaaagt

SEQ ID NO: 2120017 - DNA, 15 bp, Homo sapiens
aaaaataagaaagtg

SEQ ID NO: 2120018 - DNA, 15 bp, Homo sapiens
aaaataagaaagtgc

SEQ ID NO: 2120019 - DNA, 15 bp, Homo sapiens
aaataagaaagtgct

SEQ ID NO: 2120020 - DNA, 15 bp, Homo sapiens
aataagaaagtgctc

SEQ ID NO: 2120021 - DNA, 15 bp, Homo sapiens
ataagaaagtgctca

SEQ ID NO: 2120022 - DNA, 15 bp, Homo sapiens
taagaaagtgctcaa

SEQ ID NO: 2120023 - DNA, 15 bp, Homo sapiens
aagaaagtgctcaaa

SEQ ID NO: 2120024 - DNA, 15 bp, Homo sapiens
agaaagtgctcaaac

SEQ ID NO: 2120025 - DNA, 15 bp, Homo sapiens
gaaagtgctcaaaca

SEQ ID NO: 2120026 - DNA, 15 bp, Homo sapiens
aaagtgctcaaacaa

SEQ ID NO: 2120027 - DNA, 15 bp, Homo sapiens
aagtgctcaaacaaa

SEQ ID NO: 2120028 - DNA, 15 bp, Homo sapiens
agtgctcaaacaaaa

SEQ ID NO: 2120029 - DNA, 15 bp, Homo sapiens
gtgctcaaacaaaaa

SEQ ID NO: 2120030 - DNA, 15 bp, Homo sapiens
tgctcaaacaaaaaa

SEQ ID NO: 2120031 - DNA, 15 bp, Homo sapiens
gctcaaacaaaaaac

SEQ ID NO: 2120032 - DNA, 15 bp, Homo sapiens
ctcaaacaaaaaacc

SEQ ID NO: 2120033 - DNA, 15 bp, Homo sapiens
tcaaacaaaaaaccc

SEQ ID NO: 2120034 - DNA, 15 bp, Homo sapiens
caaacaaaaaaccca

SEQ ID NO: 2120035 - DNA, 15 bp, Homo sapiens
aaacaaaaaacccac

SEQ ID NO: 2120036 - DNA, 15 bp, Homo sapiens
aacaaaaaacccaca

SEQ ID NO: 2120037 - DNA, 15 bp, Homo sapiens
acaaaaaacccacat

SEQ ID NO: 2120038 - DNA, 15 bp, Homo sapiens
caaaaaacccacatt

SEQ ID NO: 2120039 - DNA, 15 bp, Homo sapiens
aaaaaacccacattc

SEQ ID NO: 2120040 - DNA, 15 bp, Homo sapiens
aaaaacccacattca

SEQ ID NO: 2120041 - DNA, 15 bp, Homo sapiens
aaaacccacattcat

SEQ ID NO: 2120042 - DNA, 15 bp, Homo sapiens
aaacccacattcatg

SEQ ID NO: 2120043 - DNA, 15 bp, Homo sapiens
aacccacattcatgg

SEQ ID NO: 2120044 - DNA, 15 bp, Homo sapiens
acccacattcatggg

SEQ ID NO: 2120045 - DNA, 15 bp, Homo sapiens
cccacattcatgggg

SEQ ID NO: 2120046 - DNA, 15 bp, Homo sapiens
ccacattcatggggt

SEQ ID NO: 2120047 - DNA, 15 bp, Homo sapiens
cacattcatggggtt

SEQ ID NO: 2120048 - DNA, 15 bp, Homo sapiens
acattcatggggtta

SEQ ID NO: 2120049 - DNA, 15 bp, Homo sapiens
cattcatggggttat

SEQ ID NO: 2120050 - DNA, 15 bp, Homo sapiens
attcatggggttata

SEQ ID NO: 2120051 - DNA, 15 bp, Homo sapiens
ttcatggggttatat

SEQ ID NO: 2120052 - DNA, 15 bp, Homo sapiens
tcatggggttatatc

SEQ ID NO: 2120053 - DNA, 15 bp, Homo sapiens
catggggttatatca

SEQ ID NO: 2120054 - DNA, 15 bp, Homo sapiens
atggggttatatcaa

SEQ ID NO: 2120055 - DNA, 15 bp, Homo sapiens
tggggttatatcaaa

SEQ ID NO: 2120056 - DNA, 15 bp, Homo sapiens
ggggttatatcaaag

SEQ ID NO: 2120057 - DNA, 15 bp, Homo sapiens
gggttatatcaaagc

SEQ ID NO: 2120058 - DNA, 15 bp, Homo sapiens
ggttatatcaaagcc

SEQ ID NO: 2120059 - DNA, 15 bp, Homo sapiens
gttatatcaaagcca

SEQ ID NO: 2120060 - DNA, 15 bp, Homo sapiens
ttatatcaaagccaa

SEQ ID NO: 2120061 - DNA, 15 bp, Homo sapiens
tatatcaaagccaaa

SEQ ID NO: 2120062 - DNA, 15 bp, Homo sapiens
atatcaaagccaaat

SEQ ID NO: 2120063 - DNA, 15 bp, Homo sapiens
tatcaaagccaaatg

SEQ ID NO: 2120064 - DNA, 15 bp, Homo sapiens
atcaaagccaaatga

SEQ ID NO: 2120065 - DNA, 15 bp, Homo sapiens
tcaaagccaaatgaa

SEQ ID NO: 2120066 - DNA, 15 bp, Homo sapiens
caaagccaaatgaaa

SEQ ID NO: 2120067 - DNA, 15 bp, Homo sapiens
aaagccaaatgaaag

SEQ ID NO: 2120068 - DNA, 15 bp, Homo sapiens
aagccaaatgaaaga

SEQ ID NO: 2120069 - DNA, 15 bp, Homo sapiens
agccaaatgaaagac

SEQ ID NO: 2120070 - DNA, 15 bp, Homo sapiens
gccaaatgaaagacc

SEQ ID NO: 2120071 - DNA, 15 bp, Homo sapiens
ccaaatgaaagacct

SEQ ID NO: 2120072 - DNA, 15 bp, Homo sapiens
caaatgaaagacctc

SEQ ID NO: 2120073 - DNA, 15 bp, Homo sapiens
aaatgaaagacctcc

SEQ ID NO: 2120074 - DNA, 15 bp, Homo sapiens
aatgaaagacctccc

SEQ ID NO: 2120075 - DNA, 15 bp, Homo sapiens
atgaaagacctccca

SEQ ID NO: 2120076 - DNA, 15 bp, Homo sapiens
tgaaagacctcccaa

SEQ ID NO: 2120077 - DNA, 15 bp, Homo sapiens
gaaagacctcccaat

SEQ ID NO: 2120078 - DNA, 15 bp, Homo sapiens
aaagacctcccaatg

SEQ ID NO: 2120079 - DNA, 15 bp, Homo sapiens
aagacctcccaatgg

SEQ ID NO: 2120080 - DNA, 15 bp, Homo sapiens
agacctcccaatggc

SEQ ID NO: 2120081 - DNA, 15 bp, Homo sapiens
gacctcccaatggcc

SEQ ID NO: 2120082 - DNA, 15 bp, Homo sapiens
acctcccaatggcca

SEQ ID NO: 2120083 - DNA, 15 bp, Homo sapiens
cctcccaatggccaa

SEQ ID NO: 2120084 - DNA, 15 bp, Homo sapiens
ctcccaatggccaaa

SEQ ID NO: 2120085 - DNA, 15 bp, Homo sapiens
tcccaatggccaaag

SEQ ID NO: 2120086 - DNA, 15 bp, Homo sapiens
cccaatggccaaagc

SEQ ID NO: 2120087 - DNA, 15 bp, Homo sapiens
ccaatggccaaagct

SEQ ID NO: 2120088 - DNA, 15 bp, Homo sapiens
caatggccaaagctg

SEQ ID NO: 2120089 - DNA, 15 bp, Homo sapiens
aatggccaaagctgg

SEQ ID NO: 2120090 - DNA, 15 bp, Homo sapiens
atggccaaagctgga

SEQ ID NO: 2120091 - DNA, 15 bp, Homo sapiens
tggccaaagctggaa

SEQ ID NO: 2120092 - DNA, 15 bp, Homo sapiens
ggccaaagctggaac

SEQ ID NO: 2120093 - DNA, 15 bp, Homo sapiens
gccaaagctggaaca

SEQ ID NO: 2120094 - DNA, 15 bp, Homo sapiens
ccaaagctggaacaa

SEQ ID NO: 2120095 - DNA, 15 bp, Homo sapiens
caaagctggaacaat

SEQ ID NO: 2120096 - DNA, 15 bp, Homo sapiens
aaagctggaacaatt

SEQ ID NO: 2120097 - DNA, 15 bp, Homo sapiens
aagctggaacaattt

SEQ ID NO: 2120098 - DNA, 15 bp, Homo sapiens
agctggaacaatttg

SEQ ID NO: 2120099 - DNA, 15 bp, Homo sapiens
gctggaacaatttga

SEQ ID NO: 2120100 - DNA, 15 bp, Homo sapiens
ctggaacaatttgaa

SEQ ID NO: 2120101 - DNA, 15 bp, Homo sapiens
tggaacaatttgaac

SEQ ID NO: 2120102 - DNA, 15 bp, Homo sapiens
ggaacaatttgaaca

SEQ ID NO: 2120103 - DNA, 15 bp, Homo sapiens
gaacaatttgaacaa

SEQ ID NO: 2120104 - DNA, 15 bp, Homo sapiens
aacaatttgaacaac

SEQ ID NO: 2120105 - DNA, 15 bp, Homo sapiens
acaatttgaacaaca

SEQ ID NO: 2120106 - DNA, 15 bp, Homo sapiens
caatttgaacaacag

SEQ ID NO: 2120107 - DNA, 15 bp, Homo sapiens
aatttgaacaacaga

SEQ ID NO: 2120108 - DNA, 15 bp, Homo sapiens
atttgaacaacagaa

SEQ ID NO: 2120109 - DNA, 15 bp, Homo sapiens
tttgaacaacagaat

SEQ ID NO: 2120110 - DNA, 15 bp, Homo sapiens
ttgaacaacagaata

SEQ ID NO: 2120111 - DNA, 15 bp, Homo sapiens
tgaacaacagaataa

SEQ ID NO: 2120112 - DNA, 15 bp, Homo sapiens
gaacaacagaataaa

SEQ ID NO: 2120113 - DNA, 15 bp, Homo sapiens
aacaacagaataaag

SEQ ID NO: 2120114 - DNA, 15 bp, Homo sapiens
acaacagaataaagt

SEQ ID NO: 2120115 - DNA, 15 bp, Homo sapiens
caacagaataaagta

SEQ ID NO: 2120116 - DNA, 15 bp, Homo sapiens
aacagaataaagtaa

SEQ ID NO: 2120117 - DNA, 15 bp, Homo sapiens
acagaataaagtaat

SEQ ID NO: 2120118 - DNA, 15 bp, Homo sapiens
cagaataaagtaata

SEQ ID NO: 2120119 - DNA, 15 bp, Homo sapiens
agaataaagtaatac

SEQ ID NO: 2120120 - DNA, 15 bp, Homo sapiens
gaataaagtaatact

SEQ ID NO: 2120121 - DNA, 15 bp, Homo sapiens
aataaagtaatactg

SEQ ID NO: 2120122 - DNA, 15 bp, Homo sapiens
ataaagtaatactgt

SEQ ID NO: 2120123 - DNA, 15 bp, Homo sapiens
taaagtaatactgta

SEQ ID NO: 2120124 - DNA, 15 bp, Homo sapiens
aaagtaatactgtat

SEQ ID NO: 2120125 - DNA, 15 bp, Homo sapiens
aagtaatactgtatt

SEQ ID NO: 2120126 - DNA, 15 bp, Homo sapiens
agtaatactgtatta

SEQ ID NO: 2120127 - DNA, 15 bp, Homo sapiens
gtaatactgtattat

SEQ ID NO: 2120128 - DNA, 15 bp, Homo sapiens
taatactgtattata

SEQ ID NO: 2120129 - DNA, 15 bp, Homo sapiens
aatactgtattataa

SEQ ID NO: 2120130 - DNA, 15 bp, Homo sapiens
atactgtattataac

SEQ ID NO: 2120131 - DNA, 15 bp, Homo sapiens
tactgtattataacc

SEQ ID NO: 2120132 - DNA, 15 bp, Homo sapiens
actgtattataaccc

SEQ ID NO: 2120133 - DNA, 15 bp, Homo sapiens
ctgtattataaccca

SEQ ID NO: 2120134 - DNA, 15 bp, Homo sapiens
tgtattataacccag

SEQ ID NO: 2120135 - DNA, 15 bp, Homo sapiens
gtattataacccaga

SEQ ID NO: 2120136 - DNA, 15 bp, Homo sapiens
tattataacccagag

SEQ ID NO: 2120137 - DNA, 15 bp, Homo sapiens
attataacccagagt

SEQ ID NO: 2120138 - DNA, 15 bp, Homo sapiens
ttataacccagagta

SEQ ID NO: 2120139 - DNA, 15 bp, Homo sapiens
tataacccagagtat

SEQ ID NO: 2120140 - DNA, 15 bp, Homo sapiens
ataacccagagtata

SEQ ID NO: 2120141 - DNA, 15 bp, Homo sapiens
taacccagagtataa

SEQ ID NO: 2120142 - DNA, 15 bp, Homo sapiens
aacccagagtataaa

SEQ ID NO: 2120143 - DNA, 15 bp, Homo sapiens
acccagagtataaaa

SEQ ID NO: 2120144 - DNA, 15 bp, Homo sapiens
cccagagtataaaat

SEQ ID NO: 2120145 - DNA, 15 bp, Homo sapiens
ccagagtataaaata

SEQ ID NO: 2120146 - DNA, 15 bp, Homo sapiens
cagagtataaaatat

SEQ ID NO: 2120147 - DNA, 15 bp, Homo sapiens
agagtataaaatatc

SEQ ID NO: 2120148 - DNA, 15 bp, Homo sapiens
gagtataaaatatcc

SEQ ID NO: 2120149 - DNA, 15 bp, Homo sapiens
agtataaaatatccc

SEQ ID NO: 2120150 - DNA, 15 bp, Homo sapiens
gtataaaatatccct

SEQ ID NO: 2120151 - DNA, 15 bp, Homo sapiens
tataaaatatccctg

SEQ ID NO: 2120152 - DNA, 15 bp, Homo sapiens
ataaaatatccctga

SEQ ID NO: 2120153 - DNA, 15 bp, Homo sapiens
taaaatatccctgag

SEQ ID NO: 2120154 - DNA, 15 bp, Homo sapiens
aaaatatccctgaga

SEQ ID NO: 2120155 - DNA, 15 bp, Homo sapiens
aaatatccctgagat

SEQ ID NO: 2120156 - DNA, 15 bp, Homo sapiens
aatatccctgagatc

SEQ ID NO: 2120157 - DNA, 15 bp, Homo sapiens
atatccctgagatca

SEQ ID NO: 2120158 - DNA, 15 bp, Homo sapiens
tatccctgagatcat

SEQ ID NO: 2120159 - DNA, 15 bp, Homo sapiens
atccctgagatcata

SEQ ID NO: 2120160 - DNA, 15 bp, Homo sapiens
tccctgagatcatac

SEQ ID NO: 2120161 - DNA, 15 bp, Homo sapiens
ccctgagatcatact

SEQ ID NO: 2120162 - DNA, 15 bp, Homo sapiens
cctgagatcatactg

SEQ ID NO: 2120163 - DNA, 15 bp, Homo sapiens
ctgagatcatactga

SEQ ID NO: 2120164 - DNA, 15 bp, Homo sapiens
tgagatcatactgat

SEQ ID NO: 2120165 - DNA, 15 bp, Homo sapiens
gagatcatactgata

SEQ ID NO: 2120166 - DNA, 15 bp, Homo sapiens
agatcatactgatat

SEQ ID NO: 2120167 - DNA, 15 bp, Homo sapiens
gatcatactgatata

SEQ ID NO: 2120168 - DNA, 15 bp, Homo sapiens
atcatactgatataa

SEQ ID NO: 2120169 - DNA, 15 bp, Homo sapiens
tcatactgatataaa

SEQ ID NO: 2120170 - DNA, 15 bp, Homo sapiens
catactgatataaat

SEQ ID NO: 2120171 - DNA, 15 bp, Homo sapiens
atactgatataaatg

SEQ ID NO: 2120172 - DNA, 15 bp, Homo sapiens
tactgatataaatga

SEQ ID NO: 2120173 - DNA, 15 bp, Homo sapiens
actgatataaatgac

SEQ ID NO: 2120174 - DNA, 15 bp, Homo sapiens
ctgatataaatgact

SEQ ID NO: 2120175 - DNA, 15 bp, Homo sapiens
tgatataaatgactg

SEQ ID NO: 2120176 - DNA, 15 bp, Homo sapiens
gatataaatgactga

SEQ ID NO: 2120177 - DNA, 15 bp, Homo sapiens
atataaatgactgaa

SEQ ID NO: 2120178 - DNA, 15 bp, Homo sapiens
tataaatgactgaat

SEQ ID NO: 2120179 - DNA, 15 bp, Homo sapiens
ataaatgactgaata

SEQ ID NO: 2120180 - DNA, 15 bp, Homo sapiens
taaatgactgaataa

SEQ ID NO: 2120181 - DNA, 15 bp, Homo sapiens
aaatgactgaataaa

SEQ ID NO: 2120182 - DNA, 15 bp, Homo sapiens
aatgactgaataaac

SEQ ID NO: 2120183 - DNA, 15 bp, Homo sapiens
atgactgaataaaca

SEQ ID NO: 2120184 - DNA, 15 bp, Homo sapiens
tgactgaataaacac

SEQ ID NO: 2120185 - DNA, 15 bp, Homo sapiens
gactgaataaacaca

SEQ ID NO: 2120186 - DNA, 15 bp, Homo sapiens
actgaataaacacaa

SEQ ID NO: 2120187 - DNA, 15 bp, Homo sapiens
ctgaataaacacaat

SEQ ID NO: 2120188 - DNA, 15 bp, Homo sapiens
tgaataaacacaata

SEQ ID NO: 2120189 - DNA, 15 bp, Homo sapiens
gaataaacacaatac

SEQ ID NO: 2120190 - DNA, 15 bp, Homo sapiens
aataaacacaataca

SEQ ID NO: 2120191 - DNA, 15 bp, Homo sapiens
ataaacacaatacat

SEQ ID NO: 2120192 - DNA, 15 bp, Homo sapiens
taaacacaatacatt

SEQ ID NO: 2120193 - DNA, 15 bp, Homo sapiens
aaacacaatacattg

SEQ ID NO: 2120194 - DNA, 15 bp, Homo sapiens
aacacaatacattgt

SEQ ID NO: 2120195 - DNA, 15 bp, Homo sapiens
acacaatacattgtg

SEQ ID NO: 2120196 - DNA, 15 bp, Homo sapiens
cacaatacattgtgg

SEQ ID NO: 2120197 - DNA, 15 bp, Homo sapiens
acaatacattgtgga

SEQ ID NO: 2120198 - DNA, 15 bp, Homo sapiens
caatacattgtggag

SEQ ID NO: 2120199 - DNA, 15 bp, Homo sapiens
aatacattgtggaga

SEQ ID NO: 2120200 - DNA, 15 bp, Homo sapiens
atacattgtggagaa

SEQ ID NO: 2120201 - DNA, 15 bp, Homo sapiens
tacattgtggagaaa

SEQ ID NO: 2120202 - DNA, 15 bp, Homo sapiens
acattgtggagaaaa

SEQ ID NO: 2120203 - DNA, 15 bp, Homo sapiens
cattgtggagaaaag

SEQ ID NO: 2120204 - DNA, 15 bp, Homo sapiens
attgtggagaaaaga

SEQ ID NO: 2120205 - DNA, 15 bp, Homo sapiens
ttgtggagaaaagac

SEQ ID NO: 2120206 - DNA, 15 bp, Homo sapiens
tgtggagaaaagaca

SEQ ID NO: 2120207 - DNA, 15 bp, Homo sapiens
gtggagaaaagacat

SEQ ID NO: 2120208 - DNA, 15 bp, Homo sapiens
tggagaaaagacatc

SEQ ID NO: 2120209 - DNA, 15 bp, Homo sapiens
ggagaaaagacatcc

SEQ ID NO: 2120210 - DNA, 15 bp, Homo sapiens
gagaaaagacatcct

SEQ ID NO: 2120211 - DNA, 15 bp, Homo sapiens
agaaaagacatcctg

SEQ ID NO: 2120212 - DNA, 15 bp, Homo sapiens
gaaaagacatcctgt

SEQ ID NO: 2120213 - DNA, 15 bp, Homo sapiens
aaaagacatcctgtg

SEQ ID NO: 2120214 - DNA, 15 bp, Homo sapiens
aaagacatcctgtgc

SEQ ID NO: 2120215 - DNA, 15 bp, Homo sapiens
aagacatcctgtgca

SEQ ID NO: 2120216 - DNA, 15 bp, Homo sapiens
agacatcctgtgcaa

SEQ ID NO: 2120217 - DNA, 15 bp, Homo sapiens
gacatcctgtgcaaa

SEQ ID NO: 2120218 - DNA, 15 bp, Homo sapiens
acatcctgtgcaaaa

SEQ ID NO: 2120219 - DNA, 15 bp, Homo sapiens
catcctgtgcaaaag

SEQ ID NO: 2120220 - DNA, 15 bp, Homo sapiens
atcctgtgcaaaaga

SEQ ID NO: 2120221 - DNA, 15 bp, Homo sapiens
tcctgtgcaaaagaa

SEQ ID NO: 2120222 - DNA, 15 bp, Homo sapiens
cctgtgcaaaagaat

SEQ ID NO: 2120223 - DNA, 15 bp, Homo sapiens
ctgtgcaaaagaatt

SEQ ID NO: 2120224 - DNA, 15 bp, Homo sapiens
tgcaaaagaattcca

SEQ ID NO: 2120225 - DNA, 15 bp, Homo sapiens
gcaaaagaattccaa

SEQ ID NO: 2120226 - DNA, 15 bp, Homo sapiens
caaaagaattccaaa

SEQ ID NO: 2120227 - DNA, 15 bp, Homo sapiens
aaaagaattccaaat

SEQ ID NO: 2120228 - DNA, 15 bp, Homo sapiens
aaagaattccaaata

SEQ ID NO: 2120229 - DNA, 15 bp, Homo sapiens
aagaattccaaataa

SEQ ID NO: 2120230 - DNA, 15 bp, Homo sapiens
agaattccaaataat

SEQ ID NO: 2120231 - DNA, 15 bp, Homo sapiens
gaattccaaataatt

SEQ ID NO: 2120232 - DNA, 15 bp, Homo sapiens
aattccaaataattt

SEQ ID NO: 2120233 - DNA, 15 bp, Homo sapiens
attccaaataattta

SEQ ID NO: 2120234 - DNA, 15 bp, Homo sapiens
ttccaaataatttat

SEQ ID NO: 2120235 - DNA, 15 bp, Homo sapiens
tccaaataatttatg

SEQ ID NO: 2120236 - DNA, 15 bp, Homo sapiens
ccaaataatttatgt

SEQ ID NO: 2120237 - DNA, 15 bp, Homo sapiens
caaataatttatgta

SEQ ID NO: 2120238 - DNA, 15 bp, Homo sapiens
aaataatttatgtaa

SEQ ID NO: 2120239 - DNA, 15 bp, Homo sapiens
aataatttatgtaaa

SEQ ID NO: 2120240 - DNA, 15 bp, Homo sapiens
ataatttatgtaaat

SEQ ID NO: 2120241 - DNA, 15 bp, Homo sapiens
taatttatgtaaata

SEQ ID NO: 2120242 - DNA, 15 bp, Homo sapiens
aatttatgtaaatac

SEQ ID NO: 2120243 - DNA, 15 bp, Homo sapiens
atttatgtaaatact

SEQ ID NO: 2120244 - DNA, 15 bp, Homo sapiens
tttatgtaaatactc

SEQ ID NO: 2120245 - DNA, 15 bp, Homo sapiens
ttatgtaaatactct

SEQ ID NO: 2120246 - DNA, 15 bp, Homo sapiens
tatgtaaatactctg

SEQ ID NO: 2120247 - DNA, 15 bp, Homo sapiens
atgtaaatactctgc

SEQ ID NO: 2120248 - DNA, 15 bp, Homo sapiens
tgtaaatactctgcc

SEQ ID NO: 2120249 - DNA, 15 bp, Homo sapiens
gtaaatactctgccc

SEQ ID NO: 2120250 - DNA, 15 bp, Homo sapiens
taaatactctgccct

SEQ ID NO: 2120251 - DNA, 15 bp, Homo sapiens
aaatactctgccctc

SEQ ID NO: 2120252 - DNA, 15 bp, Homo sapiens
aatactctgccctca

SEQ ID NO: 2120253 - DNA, 15 bp, Homo sapiens
atactctgccctcaa

SEQ ID NO: 2120254 - DNA, 15 bp, Homo sapiens
tactctgccctcaat

SEQ ID NO: 2120255 - DNA, 15 bp, Homo sapiens
actctgccctcaatg

SEQ ID NO: 2120256 - DNA, 15 bp, Homo sapiens
ctctgccctcaatga

SEQ ID NO: 2120257 - DNA, 15 bp, Homo sapiens
tctgccctcaatgag

SEQ ID NO: 2120258 - DNA, 15 bp, Homo sapiens
ctgccctcaatgagg

SEQ ID NO: 2120259 - DNA, 15 bp, Homo sapiens
tgccctcaatgaggt

SEQ ID NO: 2120260 - DNA, 15 bp, Homo sapiens
gccctcaatgaggtg

SEQ ID NO: 2120261 - DNA, 15 bp, Homo sapiens
ccctcaatgaggtgg

SEQ ID NO: 2120262 - DNA, 15 bp, Homo sapiens
cctcaatgaggtgga

SEQ ID NO: 2120263 - DNA, 15 bp, Homo sapiens
ctcaatgaggtggaa

SEQ ID NO: 2120264 - DNA, 15 bp, Homo sapiens
tcaatgaggtggaag

SEQ ID NO: 2120265 - DNA, 15 bp, Homo sapiens
caatgaggtggaagg

SEQ ID NO: 2120266 - DNA, 15 bp, Homo sapiens
aatgaggtggaaggt

SEQ ID NO: 2120267 - DNA, 15 bp, Homo sapiens
atgaggtggaaggta

SEQ ID NO: 2120268 - DNA, 15 bp, Homo sapiens
tgaggtggaaggtaa

SEQ ID NO: 2120269 - DNA, 15 bp, Homo sapiens
gaggtggaaggtaat

SEQ ID NO: 2120270 - DNA, 15 bp, Homo sapiens
aggtggaaggtaatt

SEQ ID NO: 2120271 - DNA, 15 bp, Homo sapiens
ggtggaaggtaattt

SEQ ID NO: 2120272 - DNA, 15 bp, Homo sapiens
gtggaaggtaatttc

SEQ ID NO: 2120273 - DNA, 15 bp, Homo sapiens
tggaaggtaatttcc

SEQ ID NO: 2120274 - DNA, 15 bp, Homo sapiens
ggaaggtaatttccc

SEQ ID NO: 2120275 - DNA, 15 bp, Homo sapiens
gaaggtaatttccca

SEQ ID NO: 2120276 - DNA, 15 bp, Homo sapiens
aaggtaatttcccat

SEQ ID NO: 2120277 - DNA, 15 bp, Homo sapiens
aggtaatttcccatt

SEQ ID NO: 2120278 - DNA, 15 bp, Homo sapiens
ggtaatttcccattc

SEQ ID NO: 2120279 - DNA, 15 bp, Homo sapiens
gtaatttcccattcc

SEQ ID NO: 2120280 - DNA, 15 bp, Homo sapiens
taatttcccattcct

SEQ ID NO: 2120281 - DNA, 15 bp, Homo sapiens
aatttcccattcctt

SEQ ID NO: 2120282 - DNA, 15 bp, Homo sapiens
atttcccattcctta

SEQ ID NO: 2120283 - DNA, 15 bp, Homo sapiens
tttcccattccttaa

SEQ ID NO: 2120284 - DNA, 15 bp, Homo sapiens
ttcccattccttaag

SEQ ID NO: 2120285 - DNA, 15 bp, Homo sapiens
tcccattccttaagt

SEQ ID NO: 2120286 - DNA, 15 bp, Homo sapiens
cccattccttaagtg

SEQ ID NO: 2120287 - DNA, 15 bp, Homo sapiens
ccattccttaagtgc

SEQ ID NO: 2120288 - DNA, 15 bp, Homo sapiens
cattccttaagtgct

SEQ ID NO: 2120289 - DNA, 15 bp, Homo sapiens
attccttaagtgctg

SEQ ID NO: 2120290 - DNA, 15 bp, Homo sapiens
ttccttaagtgctgg

SEQ ID NO: 2120291 - DNA, 15 bp, Homo sapiens
tccttaagtgctggc

SEQ ID NO: 2120292 - DNA, 15 bp, Homo sapiens
ccttaagtgctggct

SEQ ID NO: 2120293 - DNA, 15 bp, Homo sapiens
cttaagtgctggctg

SEQ ID NO: 2120294 - DNA, 15 bp, Homo sapiens
ttaagtgctggctgc

SEQ ID NO: 2120295 - DNA, 15 bp, Homo sapiens
taagtgctggctgca

SEQ ID NO: 2120296 - DNA, 15 bp, Homo sapiens
aagtgctggctgcac

SEQ ID NO: 2120297 - DNA, 15 bp, Homo sapiens
agtgctggctgcaca

SEQ ID NO: 2120298 - DNA, 15 bp, Homo sapiens
gtgctggctgcacat

SEQ ID NO: 2120299 - DNA, 15 bp, Homo sapiens
tgctggctgcacata

SEQ ID NO: 2120300 - DNA, 15 bp, Homo sapiens
gctggctgcacatag

SEQ ID NO: 2120301 - DNA, 15 bp, Homo sapiens
ctggctgcacatagt

SEQ ID NO: 2120302 - DNA, 15 bp, Homo sapiens
tggctgcacatagtg

SEQ ID NO: 2120303 - DNA, 15 bp, Homo sapiens
ggctgcacatagtga

SEQ ID NO: 2120304 - DNA, 15 bp, Homo sapiens
gctgcacatagtgac

SEQ ID NO: 2120305 - DNA, 15 bp, Homo sapiens
ctgcacatagtgact

SEQ ID NO: 2120306 - DNA, 15 bp, Homo sapiens
tgcacatagtgactt

SEQ ID NO: 2120307 - DNA, 15 bp, Homo sapiens
gcacatagtgacttc

SEQ ID NO: 2120308 - DNA, 15 bp, Homo sapiens
cacatagtgacttcc

SEQ ID NO: 2120309 - DNA, 15 bp, Homo sapiens
acatagtgacttcct

SEQ ID NO: 2120310 - DNA, 15 bp, Homo sapiens
catagtgacttccta

SEQ ID NO: 2120311 - DNA, 15 bp, Homo sapiens
atagtgacttcctat

SEQ ID NO: 2120312 - DNA, 15 bp, Homo sapiens
tagtgacttcctatg

SEQ ID NO: 2120313 - DNA, 15 bp, Homo sapiens
agtgacttcctatgt

SEQ ID NO: 2120314 - DNA, 15 bp, Homo sapiens
gtgacttcctatgtg

SEQ ID NO: 2120315 - DNA, 15 bp, Homo sapiens
tgacttcctatgtga

SEQ ID NO: 2120316 - DNA, 15 bp, Homo sapiens
gacttcctatgtgaa

SEQ ID NO: 2120317 - DNA, 15 bp, Homo sapiens
acttcctatgtgaac

SEQ ID NO: 2120318 - DNA, 15 bp, Homo sapiens
cttcctatgtgaaca

SEQ ID NO: 2120319 - DNA, 15 bp, Homo sapiens
ttcctatgtgaacag

SEQ ID NO: 2120320 - DNA, 15 bp, Homo sapiens
tcctatgtgaacagt

SEQ ID NO: 2120321 - DNA, 15 bp, Homo sapiens
cctatgtgaacagta

SEQ ID NO: 2120322 - DNA, 15 bp, Homo sapiens
ctatgtgaacagtat

SEQ ID NO: 2120323 - DNA, 15 bp, Homo sapiens
tatgtgaacagtata

SEQ ID NO: 2120324 - DNA, 15 bp, Homo sapiens
atgtgaacagtatag

SEQ ID NO: 2120325 - DNA, 15 bp, Homo sapiens
tgtgaacagtatagt

SEQ ID NO: 2120326 - DNA, 15 bp, Homo sapiens
gtgaacagtatagta

SEQ ID NO: 2120327 - DNA, 15 bp, Homo sapiens
tgaacagtatagtag

SEQ ID NO: 2120328 - DNA, 15 bp, Homo sapiens
gaacagtatagtagg

SEQ ID NO: 2120329 - DNA, 15 bp, Homo sapiens
aacagtatagtaggg

SEQ ID NO: 2120330 - DNA, 15 bp, Homo sapiens
acagtatagtaggga

SEQ ID NO: 2120331 - DNA, 15 bp, Homo sapiens
cagtatagtagggaa

SEQ ID NO: 2120332 - DNA, 15 bp, Homo sapiens
agtatagtagggaaa

SEQ ID NO: 2120333 - DNA, 15 bp, Homo sapiens
gtatagtagggaaat

SEQ ID NO: 2120334 - DNA, 15 bp, Homo sapiens
tatagtagggaaatg

SEQ ID NO: 2120335 - DNA, 15 bp, Homo sapiens
atagtagggaaatgg

SEQ ID NO: 2120336 - DNA, 15 bp, Homo sapiens
tagtagggaaatgga

SEQ ID NO: 2120337 - DNA, 15 bp, Homo sapiens
agtagggaaatggag

SEQ ID NO: 2120338 - DNA, 15 bp, Homo sapiens
gtagggaaatggaga

SEQ ID NO: 2120339 - DNA, 15 bp, Homo sapiens
tagggaaatggagaa

SEQ ID NO: 2120340 - DNA, 15 bp, Homo sapiens
agggaaatggagaaa

SEQ ID NO: 2120341 - DNA, 15 bp, Homo sapiens
gggaaatggagaaat

SEQ ID NO: 2120342 - DNA, 15 bp, Homo sapiens
ggaaatggagaaata

SEQ ID NO: 2120343 - DNA, 15 bp, Homo sapiens
gaaatggagaaataa

SEQ ID NO: 2120344 - DNA, 15 bp, Homo sapiens
aaatggagaaataaa

SEQ ID NO: 2120345 - DNA, 15 bp, Homo sapiens
aatggagaaataaag

SEQ ID NO: 2120346 - DNA, 15 bp, Homo sapiens
atggagaaataaaga

SEQ ID NO: 2120347 - DNA, 15 bp, Homo sapiens
tggagaaataaagac

SEQ ID NO: 2120348 - DNA, 15 bp, Homo sapiens
ggagaaataaagact

SEQ ID NO: 2120349 - DNA, 15 bp, Homo sapiens
gagaaataaagacta

SEQ ID NO: 2120350 - DNA, 15 bp, Homo sapiens
agaaataaagactaa

SEQ ID NO: 2120351 - DNA, 15 bp, Homo sapiens
gaaataaagactaat

SEQ ID NO: 2120352 - DNA, 15 bp, Homo sapiens
aaataaagactaatt

SEQ ID NO: 2120353 - DNA, 15 bp, Homo sapiens
aataaagactaattt

SEQ ID NO: 2120354 - DNA, 15 bp, Homo sapiens
ataaagactaatttt

SEQ ID NO: 2120355 - DNA, 15 bp, Homo sapiens
taaagactaatttta

SEQ ID NO: 2120356 - DNA, 15 bp, Homo sapiens
aaagactaattttac

SEQ ID NO: 2120357 - DNA, 15 bp, Homo sapiens
aagactaattttacg

SEQ ID NO: 2120358 - DNA, 15 bp, Homo sapiens
agactaattttacgc

SEQ ID NO: 2120359 - DNA, 15 bp, Homo sapiens
gactaattttacgct

SEQ ID NO: 2120360 - DNA, 15 bp, Homo sapiens
actaattttacgctg

SEQ ID NO: 2120361 - DNA, 15 bp, Homo sapiens
ctaattttacgctgg

SEQ ID NO: 2120362 - DNA, 15 bp, Homo sapiens
taattttacgctgga

SEQ ID NO: 2120363 - DNA, 15 bp, Homo sapiens
aattttacgctggag

SEQ ID NO: 2120364 - DNA, 15 bp, Homo sapiens
attttacgctggaga

SEQ ID NO: 2120365 - DNA, 15 bp, Homo sapiens
ttttacgctggagaa

SEQ ID NO: 2120366 - DNA, 15 bp, Homo sapiens
tttacgctggagaaa

SEQ ID NO: 2120367 - DNA, 15 bp, Homo sapiens
ttacgctggagaaac

SEQ ID NO: 2120368 - DNA, 15 bp, Homo sapiens
tacgctggagaaacc

SEQ ID NO: 2120369 - DNA, 15 bp, Homo sapiens
acgctggagaaacct

SEQ ID NO: 2120370 - DNA, 15 bp, Homo sapiens
cgctggagaaacctg

SEQ ID NO: 2120371 - DNA, 15 bp, Homo sapiens
gctggagaaacctga

SEQ ID NO: 2120372 - DNA, 15 bp, Homo sapiens
ctggagaaacctgac

SEQ ID NO: 2120373 - DNA, 15 bp, Homo sapiens
tggagaaacctgaca

SEQ ID NO: 2120374 - DNA, 15 bp, Homo sapiens
ggagaaacctgacaa

SEQ ID NO: 2120375 - DNA, 15 bp, Homo sapiens
gagaaacctgacaaa

SEQ ID NO: 2120376 - DNA, 15 bp, Homo sapiens
agaaacctgacaaat

SEQ ID NO: 2120377 - DNA, 15 bp, Homo sapiens
gaaacctgacaaata

SEQ ID NO: 2120378 - DNA, 15 bp, Homo sapiens
aaacctgacaaatag

SEQ ID NO: 2120379 - DNA, 15 bp, Homo sapiens
aacctgacaaatagt

SEQ ID NO: 2120380 - DNA, 15 bp, Homo sapiens
acctgacaaatagta

SEQ ID NO: 2120381 - DNA, 15 bp, Homo sapiens
cctgacaaatagtac

SEQ ID NO: 2120382 - DNA, 15 bp, Homo sapiens
ctgacaaatagtacc

SEQ ID NO: 2120383 - DNA, 15 bp, Homo sapiens
tgacaaatagtacct

SEQ ID NO: 2120384 - DNA, 15 bp, Homo sapiens
gacaaatagtacctc

SEQ ID NO: 2120385 - DNA, 15 bp, Homo sapiens
acaaatagtacctca

SEQ ID NO: 2120386 - DNA, 15 bp, Homo sapiens
caaatagtacctcag

SEQ ID NO: 2120387 - DNA, 15 bp, Homo sapiens
aaatagtacctcaga

SEQ ID NO: 2120388 - DNA, 15 bp, Homo sapiens
aatagtacctcagac

SEQ ID NO: 2120389 - DNA, 15 bp, Homo sapiens
atagtacctcagaca

SEQ ID NO: 2120390 - DNA, 15 bp, Homo sapiens
tagtacctcagacag

SEQ ID NO: 2120391 - DNA, 15 bp, Homo sapiens
agtacctcagacagg

SEQ ID NO: 2120392 - DNA, 15 bp, Homo sapiens
gtacctcagacaggt

SEQ ID NO: 2120393 - DNA, 15 bp, Homo sapiens
tacctcagacaggtg

SEQ ID NO: 2120394 - DNA, 15 bp, Homo sapiens
acctcagacaggtga

SEQ ID NO: 2120395 - DNA, 15 bp, Homo sapiens
cctcagacaggtgat

SEQ ID NO: 2120396 - DNA, 15 bp, Homo sapiens
ctcagacaggtgatt

SEQ ID NO: 2120397 - DNA, 15 bp, Homo sapiens
tcagacaggtgatta

SEQ ID NO: 2120398 - DNA, 15 bp, Homo sapiens
agacaggtgattaag

SEQ ID NO: 2120399 - DNA, 15 bp, Homo sapiens
gacaggtgattaagg

SEQ ID NO: 2120400 - DNA, 15 bp, Homo sapiens
acaggtgattaagga

SEQ ID NO: 2120401 - DNA, 15 bp, Homo sapiens
caggtgattaaggat

SEQ ID NO: 2120402 - DNA, 15 bp, Homo sapiens
aggtgattaaggata

SEQ ID NO: 2120403 - DNA, 15 bp, Homo sapiens
ggtgattaaggataa

SEQ ID NO: 2120404 - DNA, 15 bp, Homo sapiens
gtgattaaggataac

SEQ ID NO: 2120405 - DNA, 15 bp, Homo sapiens
tgattaaggataaca

SEQ ID NO: 2120406 - DNA, 15 bp, Homo sapiens
gattaaggataacat

SEQ ID NO: 2120407 - DNA, 15 bp, Homo sapiens
attaaggataacata

SEQ ID NO: 2120408 - DNA, 15 bp, Homo sapiens
ttaaggataacataa

SEQ ID NO: 2120409 - DNA, 15 bp, Homo sapiens
taaggataacataaa

SEQ ID NO: 2120410 - DNA, 15 bp, Homo sapiens
aaggataacataaac

SEQ ID NO: 2120411 - DNA, 15 bp, Homo sapiens
aggataacataaaca

SEQ ID NO: 2120412 - DNA, 15 bp, Homo sapiens
ggataacataaacag

SEQ ID NO: 2120413 - DNA, 15 bp, Homo sapiens
gataacataaacagt

SEQ ID NO: 2120414 - DNA, 15 bp, Homo sapiens
ataacataaacagtg

SEQ ID NO: 2120415 - DNA, 15 bp, Homo sapiens
taacataaacagtga

SEQ ID NO: 2120416 - DNA, 15 bp, Homo sapiens
aacataaacagtgat

SEQ ID NO: 2120417 - DNA, 15 bp, Homo sapiens
acataaacagtgata

SEQ ID NO: 2120418 - DNA, 15 bp, Homo sapiens
cataaacagtgataa

SEQ ID NO: 2120419 - DNA, 15 bp, Homo sapiens
ataaacagtgataag

SEQ ID NO: 2120420 - DNA, 15 bp, Homo sapiens
taaacagtgataagt

SEQ ID NO: 2120421 - DNA, 15 bp, Homo sapiens
aaacagtgataagtc

SEQ ID NO: 2120422 - DNA, 15 bp, Homo sapiens
aacagtgataagtca

SEQ ID NO: 2120423 - DNA, 15 bp, Homo sapiens
acagtgataagtcat

SEQ ID NO: 2120424 - DNA, 15 bp, Homo sapiens
cagtgataagtcatg

SEQ ID NO: 2120425 - DNA, 15 bp, Homo sapiens
agtgataagtcatgt

SEQ ID NO: 2120426 - DNA, 15 bp, Homo sapiens
gtgataagtcatgtt

SEQ ID NO: 2120427 - DNA, 15 bp, Homo sapiens
tgataagtcatgttg

SEQ ID NO: 2120428 - DNA, 15 bp, Homo sapiens
gataagtcatgttga

SEQ ID NO: 2120429 - DNA, 15 bp, Homo sapiens
ataagtcatgttgat

SEQ ID NO: 2120430 - DNA, 15 bp, Homo sapiens
taagtcatgttgata

SEQ ID NO: 2120431 - DNA, 15 bp, Homo sapiens
aagtcatgttgatag

SEQ ID NO: 2120432 - DNA, 15 bp, Homo sapiens
agtcatgttgatagt

SEQ ID NO: 2120433 - DNA, 15 bp, Homo sapiens
gtcatgttgatagta

SEQ ID NO: 2120434 - DNA, 15 bp, Homo sapiens
tcatgttgatagtat

SEQ ID NO: 2120435 - DNA, 15 bp, Homo sapiens
catgttgatagtatg

SEQ ID NO: 2120436 - DNA, 15 bp, Homo sapiens
atgttgatagtatgt

SEQ ID NO: 2120437 - DNA, 15 bp, Homo sapiens
tgttgatagtatgta

SEQ ID NO: 2120438 - DNA, 15 bp, Homo sapiens
gttgatagtatgtac

SEQ ID NO: 2120439 - DNA, 15 bp, Homo sapiens
ttgatagtatgtact

SEQ ID NO: 2120440 - DNA, 15 bp, Homo sapiens
tgatagtatgtactc

SEQ ID NO: 2120441 - DNA, 15 bp, Homo sapiens
gatagtatgtactct

SEQ ID NO: 2120442 - DNA, 15 bp, Homo sapiens
atagtatgtactctt

SEQ ID NO: 2120443 - DNA, 15 bp, Homo sapiens
tagtatgtactcttg

SEQ ID NO: 2120444 - DNA, 15 bp, Homo sapiens
agtatgtactcttga

SEQ ID NO: 2120445 - DNA, 15 bp, Homo sapiens
gtatgtactcttgat

SEQ ID NO: 2120446 - DNA, 15 bp, Homo sapiens
tatgtactcttgata

SEQ ID NO: 2120447 - DNA, 15 bp, Homo sapiens
atgtactcttgataa

SEQ ID NO: 2120448 - DNA, 15 bp, Homo sapiens
tgtactcttgataag

SEQ ID NO: 2120449 - DNA, 15 bp, Homo sapiens
gtactcttgataagt

SEQ ID NO: 2120450 - DNA, 15 bp, Homo sapiens
tactcttgataagtg

SEQ ID NO: 2120451 - DNA, 15 bp, Homo sapiens
actcttgataagtga

SEQ ID NO: 2120452 - DNA, 15 bp, Homo sapiens
ctcttgataagtgat

SEQ ID NO: 2120453 - DNA, 15 bp, Homo sapiens
tcttgataagtgata

SEQ ID NO: 2120454 - DNA, 15 bp, Homo sapiens
cttgataagtgataa

SEQ ID NO: 2120455 - DNA, 15 bp, Homo sapiens
ttgataagtgataag

SEQ ID NO: 2120456 - DNA, 15 bp, Homo sapiens
tgataagtgataaga

SEQ ID NO: 2120457 - DNA, 15 bp, Homo sapiens
ataagtgataagaat

SEQ ID NO: 2120458 - DNA, 15 bp, Homo sapiens
taagtgataagaatg

SEQ ID NO: 2120459 - DNA, 15 bp, Homo sapiens
aagtgataagaatgg

SEQ ID NO: 2120460 - DNA, 15 bp, Homo sapiens
agtgataagaatggc

SEQ ID NO: 2120461 - DNA, 15 bp, Homo sapiens
gtgataagaatggca

SEQ ID NO: 2120462 - DNA, 15 bp, Homo sapiens
tgataagaatggcac

SEQ ID NO: 2120463 - DNA, 15 bp, Homo sapiens
gataagaatggcact

SEQ ID NO: 2120464 - DNA, 15 bp, Homo sapiens
ataagaatggcactc

SEQ ID NO: 2120465 - DNA, 15 bp, Homo sapiens
taagaatggcactct

SEQ ID NO: 2120466 - DNA, 15 bp, Homo sapiens
aagaatggcactcta

SEQ ID NO: 2120467 - DNA, 15 bp, Homo sapiens
agaatggcactctac

SEQ ID NO: 2120468 - DNA, 15 bp, Homo sapiens
gaatggcactctacc

SEQ ID NO: 2120469 - DNA, 15 bp, Homo sapiens
aatggcactctacct

SEQ ID NO: 2120470 - DNA, 15 bp, Homo sapiens
atggcactctacctt

SEQ ID NO: 2120471 - DNA, 15 bp, Homo sapiens
tggcactctaccttt

SEQ ID NO: 2120472 - DNA, 15 bp, Homo sapiens
ggcactctacctttg

SEQ ID NO: 2120473 - DNA, 15 bp, Homo sapiens
gcactctacctttgt

SEQ ID NO: 2120474 - DNA, 15 bp, Homo sapiens
cactctacctttgtg

SEQ ID NO: 2120475 - DNA, 15 bp, Homo sapiens
actctacctttgtgg

SEQ ID NO: 2120476 - DNA, 15 bp, Homo sapiens
ctctacctttgtggt

SEQ ID NO: 2120477 - DNA, 15 bp, Homo sapiens
tctacctttgtggtc

SEQ ID NO: 2120478 - DNA, 15 bp, Homo sapiens
ctacctttgtggtct

SEQ ID NO: 2120479 - DNA, 15 bp, Homo sapiens
tacctttgtggtctt

SEQ ID NO: 2120480 - DNA, 15 bp, Homo sapiens
acctttgtggtcttc

SEQ ID NO: 2120481 - DNA, 15 bp, Homo sapiens
cctttgtggtcttcc

SEQ ID NO: 2120482 - DNA, 15 bp, Homo sapiens
ctttgtggtcttcct

SEQ ID NO: 2120483 - DNA, 15 bp, Homo sapiens
tttgtggtcttcctc

SEQ ID NO: 2120484 - DNA, 15 bp, Homo sapiens
ttgtggtcttcctcc

SEQ ID NO: 2120485 - DNA, 15 bp, Homo sapiens
tgtggtcttcctcct

SEQ ID NO: 2120486 - DNA, 15 bp, Homo sapiens
gtggtcttcctccta

SEQ ID NO: 2120487 - DNA, 15 bp, Homo sapiens
tggtcttcctcctaa

SEQ ID NO: 2120488 - DNA, 15 bp, Homo sapiens
ggtcttcctcctaaa

SEQ ID NO: 2120489 - DNA, 15 bp, Homo sapiens
gtcttcctcctaaac

SEQ ID NO: 2120490 - DNA, 15 bp, Homo sapiens
tcttcctcctaaaca

SEQ ID NO: 2120491 - DNA, 15 bp, Homo sapiens
ttcctcctaaacact

SEQ ID NO: 2120492 - DNA, 15 bp, Homo sapiens
tcctcctaaacactc

SEQ ID NO: 2120493 - DNA, 15 bp, Homo sapiens
cctcctaaacactca

SEQ ID NO: 2120494 - DNA, 15 bp, Homo sapiens
ctcctaaacactcat

SEQ ID NO: 2120495 - DNA, 15 bp, Homo sapiens
tcctaaacactcata

SEQ ID NO: 2120496 - DNA, 15 bp, Homo sapiens
cctaaacactcataa

SEQ ID NO: 2120497 - DNA, 15 bp, Homo sapiens
ctaaacactcataaa

SEQ ID NO: 2120498 - DNA, 15 bp, Homo sapiens
taaacactcataaac

SEQ ID NO: 2120499 - DNA, 15 bp, Homo sapiens
aaacactcataaacc

SEQ ID NO: 2120500 - DNA, 15 bp, Homo sapiens
aacactcataaaccc

SEQ ID NO: 2120501 - DNA, 15 bp, Homo sapiens
acactcataaaccca

SEQ ID NO: 2120502 - DNA, 15 bp, Homo sapiens
cactcataaacccaa

SEQ ID NO: 2120503 - DNA, 15 bp, Homo sapiens
actcataaacccaat

SEQ ID NO: 2120504 - DNA, 15 bp, Homo sapiens
ctcataaacccaatc

SEQ ID NO: 2120505 - DNA, 15 bp, Homo sapiens
tcataaacccaatct

SEQ ID NO: 2120506 - DNA, 15 bp, Homo sapiens
cataaacccaatcta

SEQ ID NO: 2120507 - DNA, 15 bp, Homo sapiens
ataaacccaatctag

SEQ ID NO: 2120508 - DNA, 15 bp, Homo sapiens
taaacccaatctagt

SEQ ID NO: 2120509 - DNA, 15 bp, Homo sapiens
aaacccaatctagtc

SEQ ID NO: 2120510 - DNA, 15 bp, Homo sapiens
aacccaatctagtca

SEQ ID NO: 2120511 - DNA, 15 bp, Homo sapiens
acccaatctagtcat

SEQ ID NO: 2120512 - DNA, 15 bp, Homo sapiens
cccaatctagtcatg

SEQ ID NO: 2120513 - DNA, 15 bp, Homo sapiens
ccaatctagtcatga

SEQ ID NO: 2120514 - DNA, 15 bp, Homo sapiens
caatctagtcatgag

SEQ ID NO: 2120515 - DNA, 15 bp, Homo sapiens
aatctagtcatgaga

SEQ ID NO: 2120516 - DNA, 15 bp, Homo sapiens
atctagtcatgagaa

SEQ ID NO: 2120517 - DNA, 15 bp, Homo sapiens
tctagtcatgagaag

SEQ ID NO: 2120518 - DNA, 15 bp, Homo sapiens
ctagtcatgagaaga

SEQ ID NO: 2120519 - DNA, 15 bp, Homo sapiens
tagtcatgagaagaa

SEQ ID NO: 2120520 - DNA, 15 bp, Homo sapiens
agtcatgagaagaac

SEQ ID NO: 2120521 - DNA, 15 bp, Homo sapiens
gtcatgagaagaaca

SEQ ID NO: 2120522 - DNA, 15 bp, Homo sapiens
tcatgagaagaacat

SEQ ID NO: 2120523 - DNA, 15 bp, Homo sapiens
catgagaagaacatc

SEQ ID NO: 2120524 - DNA, 15 bp, Homo sapiens
atgagaagaacatca

SEQ ID NO: 2120525 - DNA, 15 bp, Homo sapiens
tgagaagaacatcag

SEQ ID NO: 2120526 - DNA, 15 bp, Homo sapiens
gagaagaacatcaga

SEQ ID NO: 2120527 - DNA, 15 bp, Homo sapiens
agaagaacatcagac

SEQ ID NO: 2120528 - DNA, 15 bp, Homo sapiens
gaagaacatcagaca

SEQ ID NO: 2120529 - DNA, 15 bp, Homo sapiens
aagaacatcagacaa

SEQ ID NO: 2120530 - DNA, 15 bp, Homo sapiens
agaacatcagacaaa

SEQ ID NO: 2120531 - DNA, 15 bp, Homo sapiens
gaacatcagacaaat

SEQ ID NO: 2120532 - DNA, 15 bp, Homo sapiens
aacatcagacaaatt

SEQ ID NO: 2120533 - DNA, 15 bp, Homo sapiens
acatcagacaaattc

SEQ ID NO: 2120534 - DNA, 15 bp, Homo sapiens
catcagacaaattcc

SEQ ID NO: 2120535 - DNA, 15 bp, Homo sapiens
atcagacaaattcca

SEQ ID NO: 2120536 - DNA, 15 bp, Homo sapiens
tcagacaaattccaa

SEQ ID NO: 2120537 - DNA, 15 bp, Homo sapiens
cagacaaattccaat

SEQ ID NO: 2120538 - DNA, 15 bp, Homo sapiens
agacaaattccaata

SEQ ID NO: 2120539 - DNA, 15 bp, Homo sapiens
gacaaattccaatag

SEQ ID NO: 2120540 - DNA, 15 bp, Homo sapiens
acaaattccaataga

SEQ ID NO: 2120541 - DNA, 15 bp, Homo sapiens
caaattccaatagag

SEQ ID NO: 2120542 - DNA, 15 bp, Homo sapiens
aaattccaatagaga

SEQ ID NO: 2120543 - DNA, 15 bp, Homo sapiens
aattccaatagagag

SEQ ID NO: 2120544 - DNA, 15 bp, Homo sapiens
attccaatagagaga

SEQ ID NO: 2120545 - DNA, 15 bp, Homo sapiens
ttccaatagagagac

SEQ ID NO: 2120546 - DNA, 15 bp, Homo sapiens
tccaatagagagaca

SEQ ID NO: 2120547 - DNA, 15 bp, Homo sapiens
ccaatagagagacat

SEQ ID NO: 2120548 - DNA, 15 bp, Homo sapiens
caatagagagacatt

SEQ ID NO: 2120549 - DNA, 15 bp, Homo sapiens
aatagagagacattc

SEQ ID NO: 2120550 - DNA, 15 bp, Homo sapiens
atagagagacattct

SEQ ID NO: 2120551 - DNA, 15 bp, Homo sapiens
tagagagacattcta

SEQ ID NO: 2120552 - DNA, 15 bp, Homo sapiens
agagagacattctat

SEQ ID NO: 2120553 - DNA, 15 bp, Homo sapiens
gagagacattctata

SEQ ID NO: 2120554 - DNA, 15 bp, Homo sapiens
agagacattctatag

SEQ ID NO: 2120555 - DNA, 15 bp, Homo sapiens
gagacattctataga

SEQ ID NO: 2120556 - DNA, 15 bp, Homo sapiens
agacattctatagaa

SEQ ID NO: 2120557 - DNA, 15 bp, Homo sapiens
gacattctatagaat

SEQ ID NO: 2120558 - DNA, 15 bp, Homo sapiens
acattctatagaata

SEQ ID NO: 2120559 - DNA, 15 bp, Homo sapiens
cattctatagaatac

SEQ ID NO: 2120560 - DNA, 15 bp, Homo sapiens
attctatagaatact

SEQ ID NO: 2120561 - DNA, 15 bp, Homo sapiens
ttctatagaatactg

SEQ ID NO: 2120562 - DNA, 15 bp, Homo sapiens
tctatagaatactgg

SEQ ID NO: 2120563 - DNA, 15 bp, Homo sapiens
ctatagaatactgga

SEQ ID NO: 2120564 - DNA, 15 bp, Homo sapiens
tatagaatactggac

SEQ ID NO: 2120565 - DNA, 15 bp, Homo sapiens
atagaatactggacc

SEQ ID NO: 2120566 - DNA, 15 bp, Homo sapiens
tagaatactggacca

SEQ ID NO: 2120567 - DNA, 15 bp, Homo sapiens
agaatactggaccat

SEQ ID NO: 2120568 - DNA, 15 bp, Homo sapiens
gaatactggaccatt

SEQ ID NO: 2120569 - DNA, 15 bp, Homo sapiens
aatactggaccatta

SEQ ID NO: 2120570 - DNA, 15 bp, Homo sapiens
atactggaccattag

SEQ ID NO: 2120571 - DNA, 15 bp, Homo sapiens
tactggaccattagt

SEQ ID NO: 2120572 - DNA, 15 bp, Homo sapiens
actggaccattagtc

SEQ ID NO: 2120573 - DNA, 15 bp, Homo sapiens
ctggaccattagtcc

SEQ ID NO: 2120574 - DNA, 15 bp, Homo sapiens
tggaccattagtcct

SEQ ID NO: 2120575 - DNA, 15 bp, Homo sapiens
ggaccattagtcctc

SEQ ID NO: 2120576 - DNA, 15 bp, Homo sapiens
gaccattagtcctca

SEQ ID NO: 2120577 - DNA, 15 bp, Homo sapiens
accattagtcctcaa

SEQ ID NO: 2120578 - DNA, 15 bp, Homo sapiens
ccattagtcctcaaa

SEQ ID NO: 2120579 - DNA, 15 bp, Homo sapiens
cattagtcctcaaaa

SEQ ID NO: 2120580 - DNA, 15 bp, Homo sapiens
attagtcctcaaaac

SEQ ID NO: 2120581 - DNA, 15 bp, Homo sapiens
ttagtcctcaaaact

SEQ ID NO: 2120582 - DNA, 15 bp, Homo sapiens
tagtcctcaaaactg

SEQ ID NO: 2120583 - DNA, 15 bp, Homo sapiens
agtcctcaaaactgt

SEQ ID NO: 2120584 - DNA, 15 bp, Homo sapiens
gtcctcaaaactgtg

SEQ ID NO: 2120585 - DNA, 15 bp, Homo sapiens
tcctcaaaactgtga

SEQ ID NO: 2120586 - DNA, 15 bp, Homo sapiens
cctcaaaactgtgaa

SEQ ID NO: 2120587 - DNA, 15 bp, Homo sapiens
ctcaaaactgtgaag

SEQ ID NO: 2120588 - DNA, 15 bp, Homo sapiens
tcaaaactgtgaagt

SEQ ID NO: 2120589 - DNA, 15 bp, Homo sapiens
caaaactgtgaagtt

SEQ ID NO: 2120590 - DNA, 15 bp, Homo sapiens
aaaactgtgaagttc

SEQ ID NO: 2120591 - DNA, 15 bp, Homo sapiens
aaactgtgaagttca

SEQ ID NO: 2120592 - DNA, 15 bp, Homo sapiens
aactgtgaagttcat

SEQ ID NO: 2120593 - DNA, 15 bp, Homo sapiens
actgtgaagttcatc

SEQ ID NO: 2120594 - DNA, 15 bp, Homo sapiens
ctgtgaagttcatca

SEQ ID NO: 2120595 - DNA, 15 bp, Homo sapiens
tgtgaagttcatcaa

SEQ ID NO: 2120596 - DNA, 15 bp, Homo sapiens
gtgaagttcatcaaa

SEQ ID NO: 2120597 - DNA, 15 bp, Homo sapiens
tgaagttcatcaaaa

SEQ ID NO: 2120598 - DNA, 15 bp, Homo sapiens
gaagttcatcaaaaa

SEQ ID NO: 2120599 - DNA, 15 bp, Homo sapiens
aagttcatcaaaaac

SEQ ID NO: 2120600 - DNA, 15 bp, Homo sapiens
agttcatcaaaaaca

SEQ ID NO: 2120601 - DNA, 15 bp, Homo sapiens
gttcatcaaaaacaa

SEQ ID NO: 2120602 - DNA, 15 bp, Homo sapiens
ttcatcaaaaacaaa

SEQ ID NO: 2120603 - DNA, 15 bp, Homo sapiens
tcatcaaaaacaaag

SEQ ID NO: 2120604 - DNA, 15 bp, Homo sapiens
catcaaaaacaaaga

SEQ ID NO: 2120605 - DNA, 15 bp, Homo sapiens
atcaaaaacaaagag

SEQ ID NO: 2120606 - DNA, 15 bp, Homo sapiens
tcaaaaacaaagagt

SEQ ID NO: 2120607 - DNA, 15 bp, Homo sapiens
caaaaacaaagagtc

SEQ ID NO: 2120608 - DNA, 15 bp, Homo sapiens
aaaaacaaagagtct

SEQ ID NO: 2120609 - DNA, 15 bp, Homo sapiens
aaaacaaagagtctg

SEQ ID NO: 2120610 - DNA, 15 bp, Homo sapiens
aaacaaagagtctga

SEQ ID NO: 2120611 - DNA, 15 bp, Homo sapiens
aacaaagagtctgag

SEQ ID NO: 2120612 - DNA, 15 bp, Homo sapiens
acaaagagtctgaga

SEQ ID NO: 2120613 - DNA, 15 bp, Homo sapiens
caaagagtctgagaa

SEQ ID NO: 2120614 - DNA, 15 bp, Homo sapiens
aaagagtctgagaaa

SEQ ID NO: 2120615 - DNA, 15 bp, Homo sapiens
aagagtctgagaaac

SEQ ID NO: 2120616 - DNA, 15 bp, Homo sapiens
agagtctgagaaact

SEQ ID NO: 2120617 - DNA, 15 bp, Homo sapiens
gagtctgagaaactg

SEQ ID NO: 2120618 - DNA, 15 bp, Homo sapiens
agtctgagaaactgt

SEQ ID NO: 2120619 - DNA, 15 bp, Homo sapiens
gtctgagaaactgtc

SEQ ID NO: 2120620 - DNA, 15 bp, Homo sapiens
tctgagaaactgtca

SEQ ID NO: 2120621 - DNA, 15 bp, Homo sapiens
ctgagaaactgtcat

SEQ ID NO: 2120622 - DNA, 15 bp, Homo sapiens
tgagaaactgtcatt

SEQ ID NO: 2120623 - DNA, 15 bp, Homo sapiens
gagaaactgtcatta

SEQ ID NO: 2120624 - DNA, 15 bp, Homo sapiens
agaaactgtcattac

SEQ ID NO: 2120625 - DNA, 15 bp, Homo sapiens
gaaactgtcattacc

SEQ ID NO: 2120626 - DNA, 15 bp, Homo sapiens
aaactgtcattacca

SEQ ID NO: 2120627 - DNA, 15 bp, Homo sapiens
aactgtcattaccaa

SEQ ID NO: 2120628 - DNA, 15 bp, Homo sapiens
actgtcattaccaag

SEQ ID NO: 2120629 - DNA, 15 bp, Homo sapiens
ctgtcattaccaaga

SEQ ID NO: 2120630 - DNA, 15 bp, Homo sapiens
tgtcattaccaagag

SEQ ID NO: 2120631 - DNA, 15 bp, Homo sapiens
gtcattaccaagagg

SEQ ID NO: 2120632 - DNA, 15 bp, Homo sapiens
tcattaccaagagga

SEQ ID NO: 2120633 - DNA, 15 bp, Homo sapiens
cattaccaagaggag

SEQ ID NO: 2120634 - DNA, 15 bp, Homo sapiens
attaccaagaggagc

SEQ ID NO: 2120635 - DNA, 15 bp, Homo sapiens
ttaccaagaggagcc

SEQ ID NO: 2120636 - DNA, 15 bp, Homo sapiens
taccaagaggagcct

SEQ ID NO: 2120637 - DNA, 15 bp, Homo sapiens
accaagaggagccta

SEQ ID NO: 2120638 - DNA, 15 bp, Homo sapiens
ccaagaggagcctaa

SEQ ID NO: 2120639 - DNA, 15 bp, Homo sapiens
caagaggagcctaag

SEQ ID NO: 2120640 - DNA, 15 bp, Homo sapiens
aagaggagcctaagg

SEQ ID NO: 2120641 - DNA, 15 bp, Homo sapiens
agaggagcctaagga

SEQ ID NO: 2120642 - DNA, 15 bp, Homo sapiens
gaggagcctaaggag

SEQ ID NO: 2120643 - DNA, 15 bp, Homo sapiens
aggagcctaaggaga

SEQ ID NO: 2120644 - DNA, 15 bp, Homo sapiens
ggagcctaaggagac

SEQ ID NO: 2120645 - DNA, 15 bp, Homo sapiens
gagcctaaggagaca

SEQ ID NO: 2120646 - DNA, 15 bp, Homo sapiens
agcctaaggagacat

SEQ ID NO: 2120647 - DNA, 15 bp, Homo sapiens
gcctaaggagacatg

SEQ ID NO: 2120648 - DNA, 15 bp, Homo sapiens
cctaaggagacatga

SEQ ID NO: 2120649 - DNA, 15 bp, Homo sapiens
ctaaggagacatgac

SEQ ID NO: 2120650 - DNA, 15 bp, Homo sapiens
taaggagacatgact

SEQ ID NO: 2120651 - DNA, 15 bp, Homo sapiens
aaggagacatgacta

SEQ ID NO: 2120652 - DNA, 15 bp, Homo sapiens
aggagacatgactac

SEQ ID NO: 2120653 - DNA, 15 bp, Homo sapiens
ggagacatgactact

SEQ ID NO: 2120654 - DNA, 15 bp, Homo sapiens
gagacatgactacta

SEQ ID NO: 2120655 - DNA, 15 bp, Homo sapiens
agacatgactactaa

SEQ ID NO: 2120656 - DNA, 15 bp, Homo sapiens
gacatgactactaag

SEQ ID NO: 2120657 - DNA, 15 bp, Homo sapiens
acatgactactaagg

SEQ ID NO: 2120658 - DNA, 15 bp, Homo sapiens
catgactactaagga

SEQ ID NO: 2120659 - DNA, 15 bp, Homo sapiens
atgactactaaggac

SEQ ID NO: 2120660 - DNA, 15 bp, Homo sapiens
tgactactaaggaca

SEQ ID NO: 2120661 - DNA, 15 bp, Homo sapiens
gactactaaggacac

SEQ ID NO: 2120662 - DNA, 15 bp, Homo sapiens
actactaaggacaca

SEQ ID NO: 2120663 - DNA, 15 bp, Homo sapiens
ctactaaggacacat

SEQ ID NO: 2120664 - DNA, 15 bp, Homo sapiens
tactaaggacacatg

SEQ ID NO: 2120665 - DNA, 15 bp, Homo sapiens
actaaggacacatgc

SEQ ID NO: 2120666 - DNA, 15 bp, Homo sapiens
ctaaggacacatgca

SEQ ID NO: 2120667 - DNA, 15 bp, Homo sapiens
taaggacacatgcag

SEQ ID NO: 2120668 - DNA, 15 bp, Homo sapiens
aaggacacatgcagc

SEQ ID NO: 2120669 - DNA, 15 bp, Homo sapiens
aggacacatgcagcg

SEQ ID NO: 2120670 - DNA, 15 bp, Homo sapiens
ggacacatgcagcgt

SEQ ID NO: 2120671 - DNA, 15 bp, Homo sapiens
gacacatgcagcgtg

SEQ ID NO: 2120672 - DNA, 15 bp, Homo sapiens
acacatgcagcgtgg

SEQ ID NO: 2120673 - DNA, 15 bp, Homo sapiens
cacatgcagcgtggt

SEQ ID NO: 2120674 - DNA, 15 bp, Homo sapiens
acatgcagcgtggta

SEQ ID NO: 2120675 - DNA, 15 bp, Homo sapiens
catgcagcgtggtat

SEQ ID NO: 2120676 - DNA, 15 bp, Homo sapiens
atgcagcgtggtatc

SEQ ID NO: 2120677 - DNA, 15 bp, Homo sapiens
tgcagcgtggtatct

SEQ ID NO: 2120678 - DNA, 15 bp, Homo sapiens
gcagcgtggtatctt

SEQ ID NO: 2120679 - DNA, 15 bp, Homo sapiens
cagcgtggtatcttc

SEQ ID NO: 2120680 - DNA, 15 bp, Homo sapiens
agcgtggtatcttca

SEQ ID NO: 2120681 - DNA, 15 bp, Homo sapiens
gcgtggtatcttcaa

SEQ ID NO: 2120682 - DNA, 15 bp, Homo sapiens
cgtggtatcttcaat

SEQ ID NO: 2120683 - DNA, 15 bp, Homo sapiens
gtggtatcttcaatg

SEQ ID NO: 2120684 - DNA, 15 bp, Homo sapiens
tggtatcttcaatgg

SEQ ID NO: 2120685 - DNA, 15 bp, Homo sapiens
ggtatcttcaatggg

SEQ ID NO: 2120686 - DNA, 15 bp, Homo sapiens
gtatcttcaatggga

SEQ ID NO: 2120687 - DNA, 15 bp, Homo sapiens
tatcttcaatgggat

SEQ ID NO: 2120688 - DNA, 15 bp, Homo sapiens
atcttcaatgggatc

SEQ ID NO: 2120689 - DNA, 15 bp, Homo sapiens
tcttcaatgggatcc

SEQ ID NO: 2120690 - DNA, 15 bp, Homo sapiens
cttcaatgggatcct

SEQ ID NO: 2120691 - DNA, 15 bp, Homo sapiens
ttcaatgggatcctg

SEQ ID NO: 2120692 - DNA, 15 bp, Homo sapiens
tcaatgggatcctgg

SEQ ID NO: 2120693 - DNA, 15 bp, Homo sapiens
caatgggatcctgga

SEQ ID NO: 2120694 - DNA, 15 bp, Homo sapiens
aatgggatcctggaa

SEQ ID NO: 2120695 - DNA, 15 bp, Homo sapiens
atgggatcctggaac

SEQ ID NO: 2120696 - DNA, 15 bp, Homo sapiens
tgggatcctggaaca

SEQ ID NO: 2120697 - DNA, 15 bp, Homo sapiens
gggatcctggaacac

SEQ ID NO: 2120698 - DNA, 15 bp, Homo sapiens
ggatcctggaacaca

SEQ ID NO: 2120699 - DNA, 15 bp, Homo sapiens
gatcctggaacacaa

SEQ ID NO: 2120700 - DNA, 15 bp, Homo sapiens
atcctggaacacaaa

SEQ ID NO: 2120701 - DNA, 15 bp, Homo sapiens
tcctggaacacaaaa

SEQ ID NO: 2120702 - DNA, 15 bp, Homo sapiens
cctggaacacaaaaa

SEQ ID NO: 2120703 - DNA, 15 bp, Homo sapiens
ctggaacacaaaaag

SEQ ID NO: 2120704 - DNA, 15 bp, Homo sapiens
tggaacacaaaaaga

SEQ ID NO: 2120705 - DNA, 15 bp, Homo sapiens
ggaacacaaaaagaa

SEQ ID NO: 2120706 - DNA, 15 bp, Homo sapiens
gaacacaaaaagaac

SEQ ID NO: 2120707 - DNA, 15 bp, Homo sapiens
aacacaaaaagaaca

SEQ ID NO: 2120708 - DNA, 15 bp, Homo sapiens
acacaaaaagaacat

SEQ ID NO: 2120709 - DNA, 15 bp, Homo sapiens
cacaaaaagaacatt

SEQ ID NO: 2120710 - DNA, 15 bp, Homo sapiens
acaaaaagaacatta

SEQ ID NO: 2120711 - DNA, 15 bp, Homo sapiens
caaaaagaacattaa

SEQ ID NO: 2120712 - DNA, 15 bp, Homo sapiens
aaaaagaacattaag

SEQ ID NO: 2120713 - DNA, 15 bp, Homo sapiens
aaaagaacattaagg

SEQ ID NO: 2120714 - DNA, 15 bp, Homo sapiens
aaagaacattaagga

SEQ ID NO: 2120715 - DNA, 15 bp, Homo sapiens
aagaacattaaggaa

SEQ ID NO: 2120716 - DNA, 15 bp, Homo sapiens
agaacattaaggaaa

SEQ ID NO: 2120717 - DNA, 15 bp, Homo sapiens
gaacattaaggaaaa

SEQ ID NO: 2120718 - DNA, 15 bp, Homo sapiens
aacattaaggaaaaa

SEQ ID NO: 2120719 - DNA, 15 bp, Homo sapiens
acattaaggaaaaac

SEQ ID NO: 2120720 - DNA, 15 bp, Homo sapiens
cattaaggaaaaact

SEQ ID NO: 2120721 - DNA, 15 bp, Homo sapiens
attaaggaaaaacta

SEQ ID NO: 2120722 - DNA, 15 bp, Homo sapiens
ttaaggaaaaactaa

SEQ ID NO: 2120723 - DNA, 15 bp, Homo sapiens
taaggaaaaactaag

SEQ ID NO: 2120724 - DNA, 15 bp, Homo sapiens
aaggaaaaactaagg

SEQ ID NO: 2120725 - DNA, 15 bp, Homo sapiens
aggaaaaactaagga

SEQ ID NO: 2120726 - DNA, 15 bp, Homo sapiens
ggaaaaactaaggaa

SEQ ID NO: 2120727 - DNA, 15 bp, Homo sapiens
aaaaactaaggaaat

SEQ ID NO: 2120728 - DNA, 15 bp, Homo sapiens
aaaactaaggaaatc

SEQ ID NO: 2120729 - DNA, 15 bp, Homo sapiens
aaactaaggaaatct

SEQ ID NO: 2120730 - DNA, 15 bp, Homo sapiens
aactaaggaaatctg

SEQ ID NO: 2120731 - DNA, 15 bp, Homo sapiens
actaaggaaatctga

SEQ ID NO: 2120732 - DNA, 15 bp, Homo sapiens
ctaaggaaatctgaa

SEQ ID NO: 2120733 - DNA, 15 bp, Homo sapiens
taaggaaatctgaat

SEQ ID NO: 2120734 - DNA, 15 bp, Homo sapiens
aaggaaatctgaata

SEQ ID NO: 2120735 - DNA, 15 bp, Homo sapiens
aggaaatctgaataa

SEQ ID NO: 2120736 - DNA, 15 bp, Homo sapiens
ggaaatctgaataaa

SEQ ID NO: 2120737 - DNA, 15 bp, Homo sapiens
gaaatctgaataaaa

SEQ ID NO: 2120738 - DNA, 15 bp, Homo sapiens
aaatctgaataaaat

SEQ ID NO: 2120739 - DNA, 15 bp, Homo sapiens
aatctgaataaaata

SEQ ID NO: 2120740 - DNA, 15 bp, Homo sapiens
atctgaataaaatat

SEQ ID NO: 2120741 - DNA, 15 bp, Homo sapiens
tctgaataaaatatg

SEQ ID NO: 2120742 - DNA, 15 bp, Homo sapiens
ctgaataaaatatgg

SEQ ID NO: 2120743 - DNA, 15 bp, Homo sapiens
tgaataaaatatgga

SEQ ID NO: 2120744 - DNA, 15 bp, Homo sapiens
gaataaaatatggac

SEQ ID NO: 2120745 - DNA, 15 bp, Homo sapiens
aataaaatatggact

SEQ ID NO: 2120746 - DNA, 15 bp, Homo sapiens
ataaaatatggactc

SEQ ID NO: 2120747 - DNA, 15 bp, Homo sapiens
taaaatatggactct

SEQ ID NO: 2120748 - DNA, 15 bp, Homo sapiens
aaaatatggactcta

SEQ ID NO: 2120749 - DNA, 15 bp, Homo sapiens
aaatatggactctag

SEQ ID NO: 2120750 - DNA, 15 bp, Homo sapiens
aatatggactctagt

SEQ ID NO: 2120751 - DNA, 15 bp, Homo sapiens
atatggactctagtt

SEQ ID NO: 2120752 - DNA, 15 bp, Homo sapiens
tatggactctagtta

SEQ ID NO: 2120753 - DNA, 15 bp, Homo sapiens
atggactctagttaa

SEQ ID NO: 2120754 - DNA, 15 bp, Homo sapiens
tggactctagttaat

SEQ ID NO: 2120755 - DNA, 15 bp, Homo sapiens
ggactctagttaata

SEQ ID NO: 2120756 - DNA, 15 bp, Homo sapiens
gactctagttaataa

SEQ ID NO: 2120757 - DNA, 15 bp, Homo sapiens
actctagttaataat

SEQ ID NO: 2120758 - DNA, 15 bp, Homo sapiens
ctctagttaataata

SEQ ID NO: 2120759 - DNA, 15 bp, Homo sapiens
tctagttaataataa

SEQ ID NO: 2120760 - DNA, 15 bp, Homo sapiens
ctagttaataataat

SEQ ID NO: 2120761 - DNA, 15 bp, Homo sapiens
tagttaataataatg

SEQ ID NO: 2120762 - DNA, 15 bp, Homo sapiens
agttaataataatgt

SEQ ID NO: 2120763 - DNA, 15 bp, Homo sapiens
gttaataataatgta

SEQ ID NO: 2120764 - DNA, 15 bp, Homo sapiens
ttaataataatgtat

SEQ ID NO: 2120765 - DNA, 15 bp, Homo sapiens
taataataatgtatc

SEQ ID NO: 2120766 - DNA, 15 bp, Homo sapiens
aataataatgtatca

SEQ ID NO: 2120767 - DNA, 15 bp, Homo sapiens
ataataatgtatcaa

SEQ ID NO: 2120768 - DNA, 15 bp, Homo sapiens
taataatgtatcaat

SEQ ID NO: 2120769 - DNA, 15 bp, Homo sapiens
aataatgtatcaata

SEQ ID NO: 2120770 - DNA, 15 bp, Homo sapiens
ataatgtatcaatat

SEQ ID NO: 2120771 - DNA, 15 bp, Homo sapiens
taatgtatcaatatt

SEQ ID NO: 2120772 - DNA, 15 bp, Homo sapiens
aatgtatcaatattg

SEQ ID NO: 2120773 - DNA, 15 bp, Homo sapiens
atgtatcaatattgg

SEQ ID NO: 2120774 - DNA, 15 bp, Homo sapiens
tgtatcaatattggt

SEQ ID NO: 2120775 - DNA, 15 bp, Homo sapiens
gtatcaatattggtt

SEQ ID NO: 2120776 - DNA, 15 bp, Homo sapiens
tatcaatattggttt

SEQ ID NO: 2120777 - DNA, 15 bp, Homo sapiens
atcaatattggtttg

SEQ ID NO: 2120778 - DNA, 15 bp, Homo sapiens
tcaatattggtttgt

SEQ ID NO: 2120779 - DNA, 15 bp, Homo sapiens
caatattggtttgtt

SEQ ID NO: 2120780 - DNA, 15 bp, Homo sapiens
aatattggtttgttg

SEQ ID NO: 2120781 - DNA, 15 bp, Homo sapiens
atattggtttgttgt

SEQ ID NO: 2120782 - DNA, 15 bp, Homo sapiens
tattggtttgttgtg

SEQ ID NO: 2120783 - DNA, 15 bp, Homo sapiens
attggtttgttgtga

SEQ ID NO: 2120784 - DNA, 15 bp, Homo sapiens
ttggtttgttgtgac

SEQ ID NO: 2120785 - DNA, 15 bp, Homo sapiens
tggtttgttgtgaca

SEQ ID NO: 2120786 - DNA, 15 bp, Homo sapiens
ggtttgttgtgacaa

SEQ ID NO: 2120787 - DNA, 15 bp, Homo sapiens
gtttgttgtgacaaa

SEQ ID NO: 2120788 - DNA, 15 bp, Homo sapiens
tttgttgtgacaaat

SEQ ID NO: 2120789 - DNA, 15 bp, Homo sapiens
ttgttgtgacaaatg

SEQ ID NO: 2120790 - DNA, 15 bp, Homo sapiens
tgttgtgacaaatgt

SEQ ID NO: 2120791 - DNA, 15 bp, Homo sapiens
gttgtgacaaatgta

SEQ ID NO: 2120792 - DNA, 15 bp, Homo sapiens
ttgtgacaaatgtac

SEQ ID NO: 2120793 - DNA, 15 bp, Homo sapiens
tgtgacaaatgtacc

SEQ ID NO: 2120794 - DNA, 15 bp, Homo sapiens
gtgacaaatgtacca

SEQ ID NO: 2120795 - DNA, 15 bp, Homo sapiens
tgacaaatgtaccaa

SEQ ID NO: 2120796 - DNA, 15 bp, Homo sapiens
gacaaatgtaccaaa

SEQ ID NO: 2120797 - DNA, 15 bp, Homo sapiens
acaaatgtaccaaac

SEQ ID NO: 2120798 - DNA, 15 bp, Homo sapiens
caaatgtaccaaact

SEQ ID NO: 2120799 - DNA, 15 bp, Homo sapiens
aaatgtaccaaacta

SEQ ID NO: 2120800 - DNA, 15 bp, Homo sapiens
aatgtaccaaactaa

SEQ ID NO: 2120801 - DNA, 15 bp, Homo sapiens
atgtaccaaactaat

SEQ ID NO: 2120802 - DNA, 15 bp, Homo sapiens
tgtaccaaactaatg

SEQ ID NO: 2120803 - DNA, 15 bp, Homo sapiens
gtaccaaactaatgt

SEQ ID NO: 2120804 - DNA, 15 bp, Homo sapiens
taccaaactaatgta

SEQ ID NO: 2120805 - DNA, 15 bp, Homo sapiens
accaaactaatgtaa

SEQ ID NO: 2120806 - DNA, 15 bp, Homo sapiens
ccaaactaatgtaaa

SEQ ID NO: 2120807 - DNA, 15 bp, Homo sapiens
caaactaatgtaaaa

SEQ ID NO: 2120808 - DNA, 15 bp, Homo sapiens
aaactaatgtaaaat

SEQ ID NO: 2120809 - DNA, 15 bp, Homo sapiens
aactaatgtaaaatg

SEQ ID NO: 2120810 - DNA, 15 bp, Homo sapiens
actaatgtaaaatgt

SEQ ID NO: 2120811 - DNA, 15 bp, Homo sapiens
ctaatgtaaaatgtt

SEQ ID NO: 2120812 - DNA, 15 bp, Homo sapiens
taatgtaaaatgtta

SEQ ID NO: 2120813 - DNA, 15 bp, Homo sapiens
aatgtaaaatgttaa

SEQ ID NO: 2120814 - DNA, 15 bp, Homo sapiens
atgtaaaatgttaac

SEQ ID NO: 2120815 - DNA, 15 bp, Homo sapiens
tgtaaaatgttaaca

SEQ ID NO: 2120816 - DNA, 15 bp, Homo sapiens
gtaaaatgttaacac

SEQ ID NO: 2120817 - DNA, 15 bp, Homo sapiens
taaaatgttaacact

SEQ ID NO: 2120818 - DNA, 15 bp, Homo sapiens
aaaatgttaacactg

SEQ ID NO: 2120819 - DNA, 15 bp, Homo sapiens
aaatgttaacactgg

SEQ ID NO: 2120820 - DNA, 15 bp, Homo sapiens
aatgttaacactggg

SEQ ID NO: 2120821 - DNA, 15 bp, Homo sapiens
atgttaacactggga

SEQ ID NO: 2120822 - DNA, 15 bp, Homo sapiens
tgttaacactgggaa

SEQ ID NO: 2120823 - DNA, 15 bp, Homo sapiens
gttaacactgggaaa

SEQ ID NO: 2120824 - DNA, 15 bp, Homo sapiens
ttaacactgggaaaa

SEQ ID NO: 2120825 - DNA, 15 bp, Homo sapiens
taacactgggaaaaa

SEQ ID NO: 2120826 - DNA, 15 bp, Homo sapiens
aacactgggaaaaac

SEQ ID NO: 2120827 - DNA, 15 bp, Homo sapiens
acactgggaaaaact

SEQ ID NO: 2120828 - DNA, 15 bp, Homo sapiens
cactgggaaaaactg

SEQ ID NO: 2120829 - DNA, 15 bp, Homo sapiens
actgggaaaaactgg

SEQ ID NO: 2120830 - DNA, 15 bp, Homo sapiens
ctgggaaaaactggg

SEQ ID NO: 2120831 - DNA, 15 bp, Homo sapiens
tgggaaaaactgggt

SEQ ID NO: 2120832 - DNA, 15 bp, Homo sapiens
gggaaaaactgggtg

SEQ ID NO: 2120833 - DNA, 15 bp, Homo sapiens
ggaaaaactgggtgt

SEQ ID NO: 2120834 - DNA, 15 bp, Homo sapiens
gaaaaactgggtgtg

SEQ ID NO: 2120835 - DNA, 15 bp, Homo sapiens
aaaaactgggtgtga

SEQ ID NO: 2120836 - DNA, 15 bp, Homo sapiens
aaaactgggtgtgaa

SEQ ID NO: 2120837 - DNA, 15 bp, Homo sapiens
aaactgggtgtgaag

SEQ ID NO: 2120838 - DNA, 15 bp, Homo sapiens
aactgggtgtgaagt

SEQ ID NO: 2120839 - DNA, 15 bp, Homo sapiens
actgggtgtgaagta

SEQ ID NO: 2120840 - DNA, 15 bp, Homo sapiens
ctgggtgtgaagtac

SEQ ID NO: 2120841 - DNA, 15 bp, Homo sapiens
tgggtgtgaagtaca

SEQ ID NO: 2120842 - DNA, 15 bp, Homo sapiens
gggtgtgaagtacac

SEQ ID NO: 2120843 - DNA, 15 bp, Homo sapiens
ggtgtgaagtacaca

SEQ ID NO: 2120844 - DNA, 15 bp, Homo sapiens
gtgtgaagtacacag

SEQ ID NO: 2120845 - DNA, 15 bp, Homo sapiens
tgtgaagtacacaga

SEQ ID NO: 2120846 - DNA, 15 bp, Homo sapiens
gtgaagtacacagaa

SEQ ID NO: 2120847 - DNA, 15 bp, Homo sapiens
tgaagtacacagaaa

SEQ ID NO: 2120848 - DNA, 15 bp, Homo sapiens
gaagtacacagaaac

SEQ ID NO: 2120849 - DNA, 15 bp, Homo sapiens
aagtacacagaaact

SEQ ID NO: 2120850 - DNA, 15 bp, Homo sapiens
agtacacagaaactc

SEQ ID NO: 2120851 - DNA, 15 bp, Homo sapiens
gtacacagaaactct

SEQ ID NO: 2120852 - DNA, 15 bp, Homo sapiens
tacacagaaactcta

SEQ ID NO: 2120853 - DNA, 15 bp, Homo sapiens
acacagaaactctat

SEQ ID NO: 2120854 - DNA, 15 bp, Homo sapiens
cacagaaactctatc

SEQ ID NO: 2120855 - DNA, 15 bp, Homo sapiens
acagaaactctatct

SEQ ID NO: 2120856 - DNA, 15 bp, Homo sapiens
cagaaactctatctt

SEQ ID NO: 2120857 - DNA, 15 bp, Homo sapiens
agaaactctatcttc

SEQ ID NO: 2120858 - DNA, 15 bp, Homo sapiens
gaaactctatcttca

SEQ ID NO: 2120859 - DNA, 15 bp, Homo sapiens
aaactctatcttcag

SEQ ID NO: 2120860 - DNA, 15 bp, Homo sapiens
aactctatcttcaga

SEQ ID NO: 2120861 - DNA, 15 bp, Homo sapiens
actctatcttcagaa

SEQ ID NO: 2120862 - DNA, 15 bp, Homo sapiens
ctctatcttcagaat

SEQ ID NO: 2120863 - DNA, 15 bp, Homo sapiens
tctatcttcagaatc

SEQ ID NO: 2120864 - DNA, 15 bp, Homo sapiens
ctatcttcagaatca

SEQ ID NO: 2120865 - DNA, 15 bp, Homo sapiens
tatcttcagaatcat

SEQ ID NO: 2120866 - DNA, 15 bp, Homo sapiens
atcttcagaatcatt

SEQ ID NO: 2120867 - DNA, 15 bp, Homo sapiens
tcttcagaatcattc

SEQ ID NO: 2120868 - DNA, 15 bp, Homo sapiens
cttcagaatcattct

SEQ ID NO: 2120869 - DNA, 15 bp, Homo sapiens
ttcagaatcattctg

SEQ ID NO: 2120870 - DNA, 15 bp, Homo sapiens
tcagaatcattctgt

SEQ ID NO: 2120871 - DNA, 15 bp, Homo sapiens
cagaatcattctgta

SEQ ID NO: 2120872 - DNA, 15 bp, Homo sapiens
agaatcattctgtaa

SEQ ID NO: 2120873 - DNA, 15 bp, Homo sapiens
gaatcattctgtaaa

SEQ ID NO: 2120874 - DNA, 15 bp, Homo sapiens
aatcattctgtaaat

SEQ ID NO: 2120875 - DNA, 15 bp, Homo sapiens
atcattctgtaaatc

SEQ ID NO: 2120876 - DNA, 15 bp, Homo sapiens
tcattctgtaaatct

SEQ ID NO: 2120877 - DNA, 15 bp, Homo sapiens
cattctgtaaatctc

SEQ ID NO: 2120878 - DNA, 15 bp, Homo sapiens
attctgtaaatctct

SEQ ID NO: 2120879 - DNA, 15 bp, Homo sapiens
ttctgtaaatctcta

SEQ ID NO: 2120880 - DNA, 15 bp, Homo sapiens
tctgtaaatctctac

SEQ ID NO: 2120881 - DNA, 15 bp, Homo sapiens
ctgtaaatctctaca

SEQ ID NO: 2120882 - DNA, 15 bp, Homo sapiens
tgtaaatctctacac

SEQ ID NO: 2120883 - DNA, 15 bp, Homo sapiens
gtaaatctctacact

SEQ ID NO: 2120884 - DNA, 15 bp, Homo sapiens
taaatctctacactg

SEQ ID NO: 2120885 - DNA, 15 bp, Homo sapiens
aaatctctacactgt

SEQ ID NO: 2120886 - DNA, 15 bp, Homo sapiens
aatctctacactgtt

SEQ ID NO: 2120887 - DNA, 15 bp, Homo sapiens
atctctacactgttc

SEQ ID NO: 2120888 - DNA, 15 bp, Homo sapiens
tctctacactgttct

SEQ ID NO: 2120889 - DNA, 15 bp, Homo sapiens
ctctacactgttcta

SEQ ID NO: 2120890 - DNA, 15 bp, Homo sapiens
tctacactgttctaa

SEQ ID NO: 2120891 - DNA, 15 bp, Homo sapiens
ctacactgttctaac

SEQ ID NO: 2120892 - DNA, 15 bp, Homo sapiens
tacactgttctaaca

SEQ ID NO: 2120893 - DNA, 15 bp, Homo sapiens
acactgttctaacat

SEQ ID NO: 2120894 - DNA, 15 bp, Homo sapiens
cactgttctaacatt

SEQ ID NO: 2120895 - DNA, 15 bp, Homo sapiens
actgttctaacatta

SEQ ID NO: 2120896 - DNA, 15 bp, Homo sapiens
ctgttctaacattaa

SEQ ID NO: 2120897 - DNA, 15 bp, Homo sapiens
tgttctaacattaaa

SEQ ID NO: 2120898 - DNA, 15 bp, Homo sapiens
gttctaacattaaaa

SEQ ID NO: 2120899 - DNA, 15 bp, Homo sapiens
ttctaacattaaaag

SEQ ID NO: 2120900 - DNA, 15 bp, Homo sapiens
tctaacattaaaagg

SEQ ID NO: 2120901 - DNA, 15 bp, Homo sapiens
ctaacattaaaaggt

SEQ ID NO: 2120902 - DNA, 15 bp, Homo sapiens
taacattaaaaggtt

SEQ ID NO: 2120903 - DNA, 15 bp, Homo sapiens
aacattaaaaggtta

SEQ ID NO: 2120904 - DNA, 15 bp, Homo sapiens
acattaaaaggttat

SEQ ID NO: 2120905 - DNA, 15 bp, Homo sapiens
cattaaaaggttatt

SEQ ID NO: 2120906 - DNA, 15 bp, Homo sapiens
attaaaaggttattt

SEQ ID NO: 2120907 - DNA, 15 bp, Homo sapiens
ttaaaaggttatttt

SEQ ID NO: 2120908 - DNA, 15 bp, Homo sapiens
taaaaggttattttt

SEQ ID NO: 2120909 - DNA, 15 bp, Homo sapiens
aaaaggttatttttt

SEQ ID NO: 2120910 - DNA, 15 bp, Homo sapiens
aaaggttattttttc

SEQ ID NO: 2120911 - DNA, 15 bp, Homo sapiens
aaggttattttttct

SEQ ID NO: 2120912 - DNA, 15 bp, Homo sapiens
aggttattttttcta

SEQ ID NO: 2120913 - DNA, 15 bp, Homo sapiens
ggttattttttctaa

SEQ ID NO: 2120914 - DNA, 15 bp, Homo sapiens
gttattttttctaaa

SEQ ID NO: 2120915 - DNA, 15 bp, Homo sapiens
ttattttttctaaaa

SEQ ID NO: 2120916 - DNA, 15 bp, Homo sapiens
tattttttctaaaaa

SEQ ID NO: 2120917 - DNA, 15 bp, Homo sapiens
attttttctaaaaat

SEQ ID NO: 2120918 - DNA, 15 bp, Homo sapiens
ttttttctaaaaatc

SEQ ID NO: 2120919 - DNA, 15 bp, Homo sapiens
tttttctaaaaatct

SEQ ID NO: 2120920 - DNA, 15 bp, Homo sapiens
ttttctaaaaatctc

SEQ ID NO: 2120921 - DNA, 15 bp, Homo sapiens
tttctaaaaatctcc

SEQ ID NO: 2120922 - DNA, 15 bp, Homo sapiens
ttctaaaaatctccc

SEQ ID NO: 2120923 - DNA, 15 bp, Homo sapiens
tctaaaaatctccca

SEQ ID NO: 2120924 - DNA, 15 bp, Homo sapiens
ctaaaaatctcccaa

SEQ ID NO: 2120925 - DNA, 15 bp, Homo sapiens
taaaaatctcccaac

SEQ ID NO: 2120926 - DNA, 15 bp, Homo sapiens
aaaaatctcccaacc

SEQ ID NO: 2120927 - DNA, 15 bp, Homo sapiens
aaaatctcccaacca

SEQ ID NO: 2120928 - DNA, 15 bp, Homo sapiens
aaatctcccaaccag

SEQ ID NO: 2120929 - DNA, 15 bp, Homo sapiens
aatctcccaaccagt

SEQ ID NO: 2120930 - DNA, 15 bp, Homo sapiens
atctcccaaccagtt

SEQ ID NO: 2120931 - DNA, 15 bp, Homo sapiens
tctcccaaccagttg

SEQ ID NO: 2120932 - DNA, 15 bp, Homo sapiens
ctcccaaccagttgc

SEQ ID NO: 2120933 - DNA, 15 bp, Homo sapiens
tcccaaccagttgct

SEQ ID NO: 2120934 - DNA, 15 bp, Homo sapiens
cccaaccagttgctg

SEQ ID NO: 2120935 - DNA, 15 bp, Homo sapiens
ccaaccagttgctga

SEQ ID NO: 2120936 - DNA, 15 bp, Homo sapiens
caaccagttgctgaa

SEQ ID NO: 2120937 - DNA, 15 bp, Homo sapiens
aaccagttgctgaag

SEQ ID NO: 2120938 - DNA, 15 bp, Homo sapiens
accagttgctgaaga

SEQ ID NO: 2120939 - DNA, 15 bp, Homo sapiens
ccagttgctgaagac

SEQ ID NO: 2120940 - DNA, 15 bp, Homo sapiens
cagttgctgaagact

SEQ ID NO: 2120941 - DNA, 15 bp, Homo sapiens
agttgctgaagactt

SEQ ID NO: 2120942 - DNA, 15 bp, Homo sapiens
gttgctgaagactta

SEQ ID NO: 2120943 - DNA, 15 bp, Homo sapiens
ttgctgaagacttat

SEQ ID NO: 2120944 - DNA, 15 bp, Homo sapiens
tgctgaagacttata

SEQ ID NO: 2120945 - DNA, 15 bp, Homo sapiens
gctgaagacttataa

SEQ ID NO: 2120946 - DNA, 15 bp, Homo sapiens
ctgaagacttataag

SEQ ID NO: 2120947 - DNA, 15 bp, Homo sapiens
tgaagacttataaga

SEQ ID NO: 2120948 - DNA, 15 bp, Homo sapiens
gaagacttataagac

SEQ ID NO: 2120949 - DNA, 15 bp, Homo sapiens
aagacttataagaca

SEQ ID NO: 2120950 - DNA, 15 bp, Homo sapiens
agacttataagacac

SEQ ID NO: 2120951 - DNA, 15 bp, Homo sapiens
gacttataagacaca

SEQ ID NO: 2120952 - DNA, 15 bp, Homo sapiens
acttataagacacag

SEQ ID NO: 2120953 - DNA, 15 bp, Homo sapiens
cttataagacacagt

SEQ ID NO: 2120954 - DNA, 15 bp, Homo sapiens
ttataagacacagtt

SEQ ID NO: 2120955 - DNA, 15 bp, Homo sapiens
tataagacacagttt

SEQ ID NO: 2120956 - DNA, 15 bp, Homo sapiens
ataagacacagtttt

SEQ ID NO: 2120957 - DNA, 15 bp, Homo sapiens
taagacacagttttt

SEQ ID NO: 2120958 - DNA, 15 bp, Homo sapiens
aagacacagttttta

SEQ ID NO: 2120959 - DNA, 15 bp, Homo sapiens
agacacagtttttaa

SEQ ID NO: 2120960 - DNA, 15 bp, Homo sapiens
gacacagtttttaaa

SEQ ID NO: 2120961 - DNA, 15 bp, Homo sapiens
acacagtttttaaaa

SEQ ID NO: 2120962 - DNA, 15 bp, Homo sapiens
cacagtttttaaaaa

SEQ ID NO: 2120963 - DNA, 15 bp, Homo sapiens
acagtttttaaaaag

SEQ ID NO: 2120964 - DNA, 15 bp, Homo sapiens
cagtttttaaaaagc

SEQ ID NO: 2120965 - DNA, 15 bp, Homo sapiens
agtttttaaaaagca

SEQ ID NO: 2120966 - DNA, 15 bp, Homo sapiens
gtttttaaaaagcaa

SEQ ID NO: 2120967 - DNA, 15 bp, Homo sapiens
tttttaaaaagcaag

SEQ ID NO: 2120968 - DNA, 15 bp, Homo sapiens
ttttaaaaagcaagc

SEQ ID NO: 2120969 - DNA, 15 bp, Homo sapiens
tttaaaaagcaagca

SEQ ID NO: 2120970 - DNA, 15 bp, Homo sapiens
ttaaaaagcaagcaa

SEQ ID NO: 2120971 - DNA, 15 bp, Homo sapiens
taaaaagcaagcaaa

SEQ ID NO: 2120972 - DNA, 15 bp, Homo sapiens
aaaaagcaagcaaaa

SEQ ID NO: 2120973 - DNA, 15 bp, Homo sapiens
aaaagcaagcaaaat

SEQ ID NO: 2120974 - DNA, 15 bp, Homo sapiens
aaagcaagcaaaatg

SEQ ID NO: 2120975 - DNA, 15 bp, Homo sapiens
aagcaagcaaaatgg

SEQ ID NO: 2120976 - DNA, 15 bp, Homo sapiens
agcaagcaaaatgga

SEQ ID NO: 2120977 - DNA, 15 bp, Homo sapiens
gcaagcaaaatggaa

SEQ ID NO: 2120978 - DNA, 15 bp, Homo sapiens
caagcaaaatggaac

SEQ ID NO: 2120979 - DNA, 15 bp, Homo sapiens
aagcaaaatggaacc

SEQ ID NO: 2120980 - DNA, 15 bp, Homo sapiens
agcaaaatggaacct

SEQ ID NO: 2120981 - DNA, 15 bp, Homo sapiens
gcaaaatggaaccta

SEQ ID NO: 2120982 - DNA, 15 bp, Homo sapiens
caaaatggaacctaa

SEQ ID NO: 2120983 - DNA, 15 bp, Homo sapiens
aaaatggaacctaag

SEQ ID NO: 2120984 - DNA, 15 bp, Homo sapiens
aaatggaacctaaga

SEQ ID NO: 2120985 - DNA, 15 bp, Homo sapiens
aatggaacctaagaa

SEQ ID NO: 2120986 - DNA, 15 bp, Homo sapiens
atggaacctaagaac

SEQ ID NO: 2120987 - DNA, 15 bp, Homo sapiens
tggaacctaagaact

SEQ ID NO: 2120988 - DNA, 15 bp, Homo sapiens
ggaacctaagaactg

SEQ ID NO: 2120989 - DNA, 15 bp, Homo sapiens
gaacctaagaactgg

SEQ ID NO: 2120990 - DNA, 15 bp, Homo sapiens
aacctaagaactggt

SEQ ID NO: 2120991 - DNA, 15 bp, Homo sapiens
acctaagaactggta

SEQ ID NO: 2120992 - DNA, 15 bp, Homo sapiens
cctaagaactggtaa

SEQ ID NO: 2120993 - DNA, 15 bp, Homo sapiens
ctaagaactggtaag

SEQ ID NO: 2120994 - DNA, 15 bp, Homo sapiens
taagaactggtaagt

SEQ ID NO: 2120995 - DNA, 15 bp, Homo sapiens
aagaactggtaagtc

SEQ ID NO: 2120996 - DNA, 15 bp, Homo sapiens
agaactggtaagtct

SEQ ID NO: 2120997 - DNA, 15 bp, Homo sapiens
gaactggtaagtcta

SEQ ID NO: 2120998 - DNA, 15 bp, Homo sapiens
aactggtaagtctat

SEQ ID NO: 2120999 - DNA, 15 bp, Homo sapiens
actggtaagtctatg

SEQ ID NO: 2121000 - DNA, 15 bp, Homo sapiens
ctggtaagtctatgt

SEQ ID NO: 2121001 - DNA, 15 bp, Homo sapiens
tggtaagtctatgtt

SEQ ID NO: 2121002 - DNA, 15 bp, Homo sapiens
ggtaagtctatgttc

SEQ ID NO: 2121003 - DNA, 15 bp, Homo sapiens
gtaagtctatgttcc

SEQ ID NO: 2121004 - DNA, 15 bp, Homo sapiens
taagtctatgttcca

SEQ ID NO: 2121005 - DNA, 15 bp, Homo sapiens
aagtctatgttccag

SEQ ID NO: 2121006 - DNA, 15 bp, Homo sapiens
agtctatgttccaga

SEQ ID NO: 2121007 - DNA, 15 bp, Homo sapiens
gtctatgttccagat

SEQ ID NO: 2121008 - DNA, 15 bp, Homo sapiens
tctatgttccagatt

SEQ ID NO: 2121009 - DNA, 15 bp, Homo sapiens
ctatgttccagattt

SEQ ID NO: 2121010 - DNA, 15 bp, Homo sapiens
tatgttccagatttt

SEQ ID NO: 2121011 - DNA, 15 bp, Homo sapiens
aatcatctcaggaat

SEQ ID NO: 2121012 - DNA, 15 bp, Homo sapiens
atcatctcaggaatg

SEQ ID NO: 2121013 - DNA, 15 bp, Homo sapiens
tcatctcaggaatga

SEQ ID NO: 2121014 - DNA, 15 bp, Homo sapiens
catctcaggaatgaa

SEQ ID NO: 2121015 - DNA, 15 bp, Homo sapiens
atctcaggaatgaaa

SEQ ID NO: 2121016 - DNA, 15 bp, Homo sapiens
tctcaggaatgaaat

SEQ ID NO: 2121017 - DNA, 15 bp, Homo sapiens
ctcaggaatgaaatt

SEQ ID NO: 2121018 - DNA, 15 bp, Homo sapiens
tcaggaatgaaatta

SEQ ID NO: 2121019 - DNA, 15 bp, Homo sapiens
caggaatgaaattat

SEQ ID NO: 2121020 - DNA, 15 bp, Homo sapiens
aggaatgaaattata

SEQ ID NO: 2121021 - DNA, 15 bp, Homo sapiens
ggaatgaaattatat

SEQ ID NO: 2121022 - DNA, 15 bp, Homo sapiens
gaatgaaattatata

SEQ ID NO: 2121023 - DNA, 15 bp, Homo sapiens
aatgaaattatatag

SEQ ID NO: 2121024 - DNA, 15 bp, Homo sapiens
atgaaattatatagg

SEQ ID NO: 2121025 - DNA, 15 bp, Homo sapiens
tgaaattatatagga

SEQ ID NO: 2121026 - DNA, 15 bp, Homo sapiens
gaaattatataggat

SEQ ID NO: 2121027 - DNA, 15 bp, Homo sapiens
aaattatataggatg

SEQ ID NO: 2121028 - DNA, 15 bp, Homo sapiens
aattatataggatga

SEQ ID NO: 2121029 - DNA, 15 bp, Homo sapiens
attatataggatgat

SEQ ID NO: 2121030 - DNA, 15 bp, Homo sapiens
ttatataggatgata

SEQ ID NO: 2121031 - DNA, 15 bp, Homo sapiens
tatataggatgatat

SEQ ID NO: 2121032 - DNA, 15 bp, Homo sapiens
atataggatgatatc

SEQ ID NO: 2121033 - DNA, 15 bp, Homo sapiens
tataggatgatatca

SEQ ID NO: 2121034 - DNA, 15 bp, Homo sapiens
ataggatgatatcat

SEQ ID NO: 2121035 - DNA, 15 bp, Homo sapiens
taggatgatatcatt

SEQ ID NO: 2121036 - DNA, 15 bp, Homo sapiens
aggatgatatcattc

SEQ ID NO: 2121037 - DNA, 15 bp, Homo sapiens
ggatgatatcattcc

SEQ ID NO: 2121038 - DNA, 15 bp, Homo sapiens
gatgatatcattcct

SEQ ID NO: 2121039 - DNA, 15 bp, Homo sapiens
atgatatcattccta

SEQ ID NO: 2121040 - DNA, 15 bp, Homo sapiens
tgatatcattcctac

SEQ ID NO: 2121041 - DNA, 15 bp, Homo sapiens
gatatcattcctacc

SEQ ID NO: 2121042 - DNA, 15 bp, Homo sapiens
atatcattcctaccc

SEQ ID NO: 2121043 - DNA, 15 bp, Homo sapiens
tatcattcctaccca

SEQ ID NO: 2121044 - DNA, 15 bp, Homo sapiens
atcattcctacccag

SEQ ID NO: 2121045 - DNA, 15 bp, Homo sapiens
tcattcctacccagg

SEQ ID NO: 2121046 - DNA, 15 bp, Homo sapiens
cattcctacccaggt

SEQ ID NO: 2121047 - DNA, 15 bp, Homo sapiens
attcctacccaggtt

SEQ ID NO: 2121048 - DNA, 15 bp, Homo sapiens
ttcctacccaggtta

SEQ ID NO: 2121049 - DNA, 15 bp, Homo sapiens
tcctacccaggttat

SEQ ID NO: 2121050 - DNA, 15 bp, Homo sapiens
cctacccaggttatc

SEQ ID NO: 2121051 - DNA, 15 bp, Homo sapiens
ctacccaggttatca

SEQ ID NO: 2121052 - DNA, 15 bp, Homo sapiens
tacccaggttatcag

SEQ ID NO: 2121053 - DNA, 15 bp, Homo sapiens
acccaggttatcagt

SEQ ID NO: 2121054 - DNA, 15 bp, Homo sapiens
cccaggttatcagtg

SEQ ID NO: 2121055 - DNA, 15 bp, Homo sapiens
ccaggttatcagtgt

SEQ ID NO: 2121056 - DNA, 15 bp, Homo sapiens
caggttatcagtgta

SEQ ID NO: 2121057 - DNA, 15 bp, Homo sapiens
aggttatcagtgtaa

SEQ ID NO: 2121058 - DNA, 15 bp, Homo sapiens
ggttatcagtgtaac

SEQ ID NO: 2121059 - DNA, 15 bp, Homo sapiens
gttatcagtgtaacc

SEQ ID NO: 2121060 - DNA, 15 bp, Homo sapiens
ttatcagtgtaacct

SEQ ID NO: 2121061 - DNA, 15 bp, Homo sapiens
tatcagtgtaaccta

SEQ ID NO: 2121062 - DNA, 15 bp, Homo sapiens
atcagtgtaacctag

SEQ ID NO: 2121063 - DNA, 15 bp, Homo sapiens
tcagtgtaacctagc

SEQ ID NO: 2121064 - DNA, 15 bp, Homo sapiens
cagtgtaacctagca

SEQ ID NO: 2121065 - DNA, 15 bp, Homo sapiens
agtgtaacctagcat

SEQ ID NO: 2121066 - DNA, 15 bp, Homo sapiens
gtgtaacctagcata

SEQ ID NO: 2121067 - DNA, 15 bp, Homo sapiens
tgtaacctagcatag

SEQ ID NO: 2121068 - DNA, 15 bp, Homo sapiens
gtaacctagcataga

SEQ ID NO: 2121069 - DNA, 15 bp, Homo sapiens
taacctagcatagag

SEQ ID NO: 2121070 - DNA, 15 bp, Homo sapiens
aacctagcatagagc

SEQ ID NO: 2121071 - DNA, 15 bp, Homo sapiens
acctagcatagagct

SEQ ID NO: 2121072 - DNA, 15 bp, Homo sapiens
cctagcatagagctg

SEQ ID NO: 2121073 - DNA, 15 bp, Homo sapiens
ctagcatagagctgg

SEQ ID NO: 2121074 - DNA, 15 bp, Homo sapiens
tagcatagagctggg

SEQ ID NO: 2121075 - DNA, 15 bp, Homo sapiens
agcatagagctgggt

SEQ ID NO: 2121076 - DNA, 15 bp, Homo sapiens
gcatagagctgggtc

SEQ ID NO: 2121077 - DNA, 15 bp, Homo sapiens
catagagctgggtcc

SEQ ID NO: 2121078 - DNA, 15 bp, Homo sapiens
atagagctgggtcca

SEQ ID NO: 2121079 - DNA, 15 bp, Homo sapiens
tagagctgggtccac

SEQ ID NO: 2121080 - DNA, 15 bp, Homo sapiens
agagctgggtccaca

SEQ ID NO: 2121081 - DNA, 15 bp, Homo sapiens
gagctgggtccacaa

SEQ ID NO: 2121082 - DNA, 15 bp, Homo sapiens
agctgggtccacaat

SEQ ID NO: 2121083 - DNA, 15 bp, Homo sapiens
gctgggtccacaata

SEQ ID NO: 2121084 - DNA, 15 bp, Homo sapiens
ctgggtccacaatat

SEQ ID NO: 2121085 - DNA, 15 bp, Homo sapiens
tgggtccacaatatt

SEQ ID NO: 2121086 - DNA, 15 bp, Homo sapiens
gggtccacaatatta

SEQ ID NO: 2121087 - DNA, 15 bp, Homo sapiens
ggtccacaatattaa

SEQ ID NO: 2121088 - DNA, 15 bp, Homo sapiens
gtccacaatattaat

SEQ ID NO: 2121089 - DNA, 15 bp, Homo sapiens
tccacaatattaatt

SEQ ID NO: 2121090 - DNA, 15 bp, Homo sapiens
ccacaatattaattc

SEQ ID NO: 2121091 - DNA, 15 bp, Homo sapiens
cacaatattaattct

SEQ ID NO: 2121092 - DNA, 15 bp, Homo sapiens
acaatattaattcta

SEQ ID NO: 2121093 - DNA, 15 bp, Homo sapiens
caatattaattctac

SEQ ID NO: 2121094 - DNA, 15 bp, Homo sapiens
aatattaattctaca

SEQ ID NO: 2121095 - DNA, 15 bp, Homo sapiens
atattaattctacag

SEQ ID NO: 2121096 - DNA, 15 bp, Homo sapiens
tattaattctacagt

SEQ ID NO: 2121097 - DNA, 15 bp, Homo sapiens
attaattctacagtt

SEQ ID NO: 2121098 - DNA, 15 bp, Homo sapiens
ttaattctacagttc

SEQ ID NO: 2121099 - DNA, 15 bp, Homo sapiens
taattctacagttct

SEQ ID NO: 2121100 - DNA, 15 bp, Homo sapiens
aattctacagttctg

SEQ ID NO: 2121101 - DNA, 15 bp, Homo sapiens
attctacagttctgc

SEQ ID NO: 2121102 - DNA, 15 bp, Homo sapiens
ttctacagttctgct

SEQ ID NO: 2121103 - DNA, 15 bp, Homo sapiens
tctacagttctgctg

SEQ ID NO: 2121104 - DNA, 15 bp, Homo sapiens
ctacagttctgctgg

SEQ ID NO: 2121105 - DNA, 15 bp, Homo sapiens
tacagttctgctggt

SEQ ID NO: 2121106 - DNA, 15 bp, Homo sapiens
acagttctgctggtt

SEQ ID NO: 2121107 - DNA, 15 bp, Homo sapiens
cagttctgctggtta

SEQ ID NO: 2121108 - DNA, 15 bp, Homo sapiens
agttctgctggttaa

SEQ ID NO: 2121109 - DNA, 15 bp, Homo sapiens
gttctgctggttaac

SEQ ID NO: 2121110 - DNA, 15 bp, Homo sapiens
ttctgctggttaact

SEQ ID NO: 2121111 - DNA, 15 bp, Homo sapiens
tctgctggttaactc

SEQ ID NO: 2121112 - DNA, 15 bp, Homo sapiens
ctgctggttaactca

SEQ ID NO: 2121113 - DNA, 15 bp, Homo sapiens
tgctggttaactcac

SEQ ID NO: 2121114 - DNA, 15 bp, Homo sapiens
gctggttaactcaca

SEQ ID NO: 2121115 - DNA, 15 bp, Homo sapiens
ctggttaactcacat

SEQ ID NO: 2121116 - DNA, 15 bp, Homo sapiens
tggttaactcacata

SEQ ID NO: 2121117 - DNA, 15 bp, Homo sapiens
ggttaactcacatat

SEQ ID NO: 2121118 - DNA, 15 bp, Homo sapiens
gttaactcacatatg

SEQ ID NO: 2121119 - DNA, 15 bp, Homo sapiens
ttaactcacatatgt

SEQ ID NO: 2121120 - DNA, 15 bp, Homo sapiens
taactcacatatgtg

SEQ ID NO: 2121121 - DNA, 15 bp, Homo sapiens
aactcacatatgtgt

SEQ ID NO: 2121122 - DNA, 15 bp, Homo sapiens
actcacatatgtgta

SEQ ID NO: 2121123 - DNA, 15 bp, Homo sapiens
ctcacatatgtgtat

SEQ ID NO: 2121124 - DNA, 15 bp, Homo sapiens
tcacatatgtgtatt

SEQ ID NO: 2121125 - DNA, 15 bp, Homo sapiens
cacatatgtgtattt

SEQ ID NO: 2121126 - DNA, 15 bp, Homo sapiens
acatatgtgtattta

SEQ ID NO: 2121127 - DNA, 15 bp, Homo sapiens
catatgtgtatttat

SEQ ID NO: 2121128 - DNA, 15 bp, Homo sapiens
atatgtgtatttatg

SEQ ID NO: 2121129 - DNA, 15 bp, Homo sapiens
tatgtgtatttatgc

SEQ ID NO: 2121130 - DNA, 15 bp, Homo sapiens
atgtgtatttatgca

SEQ ID NO: 2121131 - DNA, 15 bp, Homo sapiens
tgtgtatttatgcat

SEQ ID NO: 2121132 - DNA, 15 bp, Homo sapiens
gtgtatttatgcatg

SEQ ID NO: 2121133 - DNA, 15 bp, Homo sapiens
tgtatttatgcatgt

SEQ ID NO: 2121134 - DNA, 15 bp, Homo sapiens
gtatttatgcatgta

SEQ ID NO: 2121135 - DNA, 15 bp, Homo sapiens
tatttatgcatgtat

SEQ ID NO: 2121136 - DNA, 15 bp, Homo sapiens
atttatgcatgtatg

SEQ ID NO: 2121137 - DNA, 15 bp, Homo sapiens
tttatgcatgtatgt

SEQ ID NO: 2121138 - DNA, 15 bp, Homo sapiens
ttatgcatgtatgta

SEQ ID NO: 2121139 - DNA, 15 bp, Homo sapiens
tatgcatgtatgtat

SEQ ID NO: 2121140 - DNA, 15 bp, Homo sapiens
atgcatgtatgtatg

SEQ ID NO: 2121141 - DNA, 15 bp, Homo sapiens
tgcatgtatgtatgt

SEQ ID NO: 2121142 - DNA, 15 bp, Homo sapiens
gcatgtatgtatgta

SEQ ID NO: 2121143 - DNA, 15 bp, Homo sapiens
catgtatgtatgtat

SEQ ID NO: 2121144 - DNA, 15 bp, Homo sapiens
gtgcctaaccaacca

SEQ ID NO: 2121145 - DNA, 15 bp, Homo sapiens
tgcctaaccaaccac

SEQ ID NO: 2121146 - DNA, 15 bp, Homo sapiens
gcctaaccaaccacc

SEQ ID NO: 2121147 - DNA, 15 bp, Homo sapiens
cctaaccaaccaccc

SEQ ID NO: 2121148 - DNA, 15 bp, Homo sapiens
ctaaccaaccaccct

SEQ ID NO: 2121149 - DNA, 15 bp, Homo sapiens
taaccaaccaccctc

SEQ ID NO: 2121150 - DNA, 15 bp, Homo sapiens
aaccaaccaccctcc

SEQ ID NO: 2121151 - DNA, 15 bp, Homo sapiens
accaaccaccctcct

SEQ ID NO: 2121152 - DNA, 15 bp, Homo sapiens
ccaaccaccctcctc

SEQ ID NO: 2121153 - DNA, 15 bp, Homo sapiens
caaccaccctcctcc

SEQ ID NO: 2121154 - DNA, 15 bp, Homo sapiens
aaccaccctcctccc

SEQ ID NO: 2121155 - DNA, 15 bp, Homo sapiens
accaccctcctcccc

SEQ ID NO: 2121156 - DNA, 15 bp, Homo sapiens
ccaccctcctcccca

SEQ ID NO: 2121157 - DNA, 15 bp, Homo sapiens
caccctcctccccaa

SEQ ID NO: 2121158 - DNA, 15 bp, Homo sapiens
accctcctccccaaa

SEQ ID NO: 2121159 - DNA, 15 bp, Homo sapiens
ccctcctccccaaag

SEQ ID NO: 2121160 - DNA, 15 bp, Homo sapiens
cctcctccccaaagc

SEQ ID NO: 2121161 - DNA, 15 bp, Homo sapiens
ctcctccccaaagcc

SEQ ID NO: 2121162 - DNA, 15 bp, Homo sapiens
tcctccccaaagcca

SEQ ID NO: 2121163 - DNA, 15 bp, Homo sapiens
cctccccaaagccac

SEQ ID NO: 2121164 - DNA, 15 bp, Homo sapiens
ctccccaaagccacc

SEQ ID NO: 2121165 - DNA, 15 bp, Homo sapiens
tccccaaagccacct

SEQ ID NO: 2121166 - DNA, 15 bp, Homo sapiens
ccccaaagccacctg

SEQ ID NO: 2121167 - DNA, 15 bp, Homo sapiens
cccaaagccacctga

SEQ ID NO: 2121168 - DNA, 15 bp, Homo sapiens
ccaaagccacctgaa

SEQ ID NO: 2121169 - DNA, 15 bp, Homo sapiens
caaagccacctgaac

SEQ ID NO: 2121170 - DNA, 15 bp, Homo sapiens
aaagccacctgaact

SEQ ID NO: 2121171 - DNA, 15 bp, Homo sapiens
aagccacctgaactg

SEQ ID NO: 2121172 - DNA, 15 bp, Homo sapiens
agccacctgaactgc

SEQ ID NO: 2121173 - DNA, 15 bp, Homo sapiens
gccacctgaactgct

SEQ ID NO: 2121174 - DNA, 15 bp, Homo sapiens
ccacctgaactgctt

SEQ ID NO: 2121175 - DNA, 15 bp, Homo sapiens
cacctgaactgcttc

SEQ ID NO: 2121176 - DNA, 15 bp, Homo sapiens
acctgaactgcttct

SEQ ID NO: 2121177 - DNA, 15 bp, Homo sapiens
cctgaactgcttctg

SEQ ID NO: 2121178 - DNA, 15 bp, Homo sapiens
ctgaactgcttctgt

SEQ ID NO: 2121179 - DNA, 15 bp, Homo sapiens
tgaactgcttctgtt

SEQ ID NO: 2121180 - DNA, 15 bp, Homo sapiens
gaactgcttctgttg

SEQ ID NO: 2121181 - DNA, 15 bp, Homo sapiens
aactgcttctgttgt

SEQ ID NO: 2121182 - DNA, 15 bp, Homo sapiens
actgcttctgttgtg

SEQ ID NO: 2121183 - DNA, 15 bp, Homo sapiens
ctgcttctgttgtgg

SEQ ID NO: 2121184 - DNA, 15 bp, Homo sapiens
tgcttctgttgtggt

SEQ ID NO: 2121185 - DNA, 15 bp, Homo sapiens
gcttctgttgtggtt

SEQ ID NO: 2121186 - DNA, 15 bp, Homo sapiens
cttctgttgtggttg

SEQ ID NO: 2121187 - DNA, 15 bp, Homo sapiens
ttctgttgtggttgt

SEQ ID NO: 2121188 - DNA, 15 bp, Homo sapiens
tctgttgtggttgtc

SEQ ID NO: 2121189 - DNA, 15 bp, Homo sapiens
ctgttgtggttgtcc

SEQ ID NO: 2121190 - DNA, 15 bp, Homo sapiens
tgttgtggttgtccc

SEQ ID NO: 2121191 - DNA, 15 bp, Homo sapiens
gttgtggttgtccca

SEQ ID NO: 2121192 - DNA, 15 bp, Homo sapiens
ttgtggttgtcccag

SEQ ID NO: 2121193 - DNA, 15 bp, Homo sapiens
tgtggttgtcccagc

SEQ ID NO: 2121194 - DNA, 15 bp, Homo sapiens
gtggttgtcccagcc

SEQ ID NO: 2121195 - DNA, 15 bp, Homo sapiens
tggttgtcccagccc

SEQ ID NO: 2121196 - DNA, 15 bp, Homo sapiens
ggttgtcccagccca

SEQ ID NO: 2121197 - DNA, 15 bp, Homo sapiens
gttgtcccagcccag

SEQ ID NO: 2121198 - DNA, 15 bp, Homo sapiens
ttgtcccagcccagg

SEQ ID NO: 2121199 - DNA, 15 bp, Homo sapiens
tgtcccagcccaggg

SEQ ID NO: 2121200 - DNA, 15 bp, Homo sapiens
gtcccagcccagggt

SEQ ID NO: 2121201 - DNA, 15 bp, Homo sapiens
tcccagcccagggta

SEQ ID NO: 2121202 - DNA, 15 bp, Homo sapiens
cccagcccagggtac

SEQ ID NO: 2121203 - DNA, 15 bp, Homo sapiens
ccagcccagggtact

SEQ ID NO: 2121204 - DNA, 15 bp, Homo sapiens
cagcccagggtacta

SEQ ID NO: 2121205 - DNA, 15 bp, Homo sapiens
agcccagggtactac

SEQ ID NO: 2121206 - DNA, 15 bp, Homo sapiens
gcccagggtactact

SEQ ID NO: 2121207 - DNA, 15 bp, Homo sapiens
cccagggtactactg

SEQ ID NO: 2121208 - DNA, 15 bp, Homo sapiens
ccagggtactactgc

SEQ ID NO: 2121209 - DNA, 15 bp, Homo sapiens
cagggtactactgca

SEQ ID NO: 2121210 - DNA, 15 bp, Homo sapiens
agggtactactgcag

SEQ ID NO: 2121211 - DNA, 15 bp, Homo sapiens
gggtactactgcagt

SEQ ID NO: 2121212 - DNA, 15 bp, Homo sapiens
ggtactactgcagtg

SEQ ID NO: 2121213 - DNA, 15 bp, Homo sapiens
gtactactgcagtgg

SEQ ID NO: 2121214 - DNA, 15 bp, Homo sapiens
tactactgcagtggc

SEQ ID NO: 2121215 - DNA, 15 bp, Homo sapiens
actactgcagtggcc

SEQ ID NO: 2121216 - DNA, 15 bp, Homo sapiens
ctactgcagtggcct

SEQ ID NO: 2121217 - DNA, 15 bp, Homo sapiens
tactgcagtggcctt

SEQ ID NO: 2121218 - DNA, 15 bp, Homo sapiens
actgcagtggccttc

SEQ ID NO: 2121219 - DNA, 15 bp, Homo sapiens
ctgcagtggccttca

SEQ ID NO: 2121220 - DNA, 15 bp, Homo sapiens
tgcagtggccttcat

SEQ ID NO: 2121221 - DNA, 15 bp, Homo sapiens
gcagtggccttcata

SEQ ID NO: 2121222 - DNA, 15 bp, Homo sapiens
cagtggccttcatat

SEQ ID NO: 2121223 - DNA, 15 bp, Homo sapiens
agtggccttcatata

SEQ ID NO: 2121224 - DNA, 15 bp, Homo sapiens
gtggccttcatatac

SEQ ID NO: 2121225 - DNA, 15 bp, Homo sapiens
tggccttcatatacc

SEQ ID NO: 2121226 - DNA, 15 bp, Homo sapiens
ggccttcatataccg

SEQ ID NO: 2121227 - DNA, 15 bp, Homo sapiens
gccttcatataccgc

SEQ ID NO: 2121228 - DNA, 15 bp, Homo sapiens
ccttcatataccgca

SEQ ID NO: 2121229 - DNA, 15 bp, Homo sapiens
cttcatataccgcag

SEQ ID NO: 2121230 - DNA, 15 bp, Homo sapiens
ttcatataccgcagg

SEQ ID NO: 2121231 - DNA, 15 bp, Homo sapiens
tcatataccgcaggt

SEQ ID NO: 2121232 - DNA, 15 bp, Homo sapiens
catataccgcaggtg

SEQ ID NO: 2121233 - DNA, 15 bp, Homo sapiens
atataccgcaggtgc

SEQ ID NO: 2121234 - DNA, 15 bp, Homo sapiens
tataccgcaggtgcc

SEQ ID NO: 2121235 - DNA, 15 bp, Homo sapiens
ataccgcaggtgcct

SEQ ID NO: 2121236 - DNA, 15 bp, Homo sapiens
taccgcaggtgccta

SEQ ID NO: 2121237 - DNA, 15 bp, Homo sapiens
accgcaggtgcctaa

SEQ ID NO: 2121238 - DNA, 15 bp, Homo sapiens
ccgcaggtgcctaag

SEQ ID NO: 2121239 - DNA, 15 bp, Homo sapiens
cgcaggtgcctaaga

SEQ ID NO: 2121240 - DNA, 15 bp, Homo sapiens
gcaggtgcctaagac

SEQ ID NO: 2121241 - DNA, 15 bp, Homo sapiens
caggtgcctaagaca

SEQ ID NO: 2121242 - DNA, 15 bp, Homo sapiens
aggtgcctaagacaa

SEQ ID NO: 2121243 - DNA, 15 bp, Homo sapiens
ggtgcctaagacaac

SEQ ID NO: 2121244 - DNA, 15 bp, Homo sapiens
gtgcctaagacaacc

SEQ ID NO: 2121245 - DNA, 15 bp, Homo sapiens
tgcctaagacaacca

SEQ ID NO: 2121246 - DNA, 15 bp, Homo sapiens
gcctaagacaaccat

SEQ ID NO: 2121247 - DNA, 15 bp, Homo sapiens
cctaagacaaccatc

SEQ ID NO: 2121248 - DNA, 15 bp, Homo sapiens
ctaagacaaccatcc

SEQ ID NO: 2121249 - DNA, 15 bp, Homo sapiens
taagacaaccatcct

SEQ ID NO: 2121250 - DNA, 15 bp, Homo sapiens
aagacaaccatcctt

SEQ ID NO: 2121251 - DNA, 15 bp, Homo sapiens
agacaaccatccttt

SEQ ID NO: 2121252 - DNA, 15 bp, Homo sapiens
gacaaccatcctttc

SEQ ID NO: 2121253 - DNA, 15 bp, Homo sapiens
acaaccatcctttcc

SEQ ID NO: 2121254 - DNA, 15 bp, Homo sapiens
caaccatcctttcca

SEQ ID NO: 2121255 - DNA, 15 bp, Homo sapiens
aaccatcctttccaa

SEQ ID NO: 2121256 - DNA, 15 bp, Homo sapiens
accatcctttccaaa

SEQ ID NO: 2121257 - DNA, 15 bp, Homo sapiens
ccatcctttccaaag

SEQ ID NO: 2121258 - DNA, 15 bp, Homo sapiens
catcctttccaaagc

SEQ ID NO: 2121259 - DNA, 15 bp, Homo sapiens
atcctttccaaagcc

SEQ ID NO: 2121260 - DNA, 15 bp, Homo sapiens
tcctttccaaagcca

SEQ ID NO: 2121261 - DNA, 15 bp, Homo sapiens
cctttccaaagccac

SEQ ID NO: 2121262 - DNA, 15 bp, Homo sapiens
ctttccaaagccacc

SEQ ID NO: 2121263 - DNA, 15 bp, Homo sapiens
tttccaaagccaccc

SEQ ID NO: 2121264 - DNA, 15 bp, Homo sapiens
ttccaaagccacccc

SEQ ID NO: 2121265 - DNA, 15 bp, Homo sapiens
tccaaagccacccct

SEQ ID NO: 2121266 - DNA, 15 bp, Homo sapiens
ccaaagccacccctg

SEQ ID NO: 2121267 - DNA, 15 bp, Homo sapiens
caaagccacccctga

SEQ ID NO: 2121268 - DNA, 15 bp, Homo sapiens
aaagccacccctgat

SEQ ID NO: 2121269 - DNA, 15 bp, Homo sapiens
aagccacccctgatg

SEQ ID NO: 2121270 - DNA, 15 bp, Homo sapiens
agccacccctgatgt

SEQ ID NO: 2121271 - DNA, 15 bp, Homo sapiens
gccacccctgatgtt

SEQ ID NO: 2121272 - DNA, 15 bp, Homo sapiens
ccacccctgatgttg

SEQ ID NO: 2121273 - DNA, 15 bp, Homo sapiens
cacccctgatgttgc

SEQ ID NO: 2121274 - DNA, 15 bp, Homo sapiens
acccctgatgttgct

SEQ ID NO: 2121275 - DNA, 15 bp, Homo sapiens
cccctgatgttgctt

SEQ ID NO: 2121276 - DNA, 15 bp, Homo sapiens
ccctgatgttgctta

SEQ ID NO: 2121277 - DNA, 15 bp, Homo sapiens
cctgatgttgcttac

SEQ ID NO: 2121278 - DNA, 15 bp, Homo sapiens
ctgatgttgcttaca

SEQ ID NO: 2121279 - DNA, 15 bp, Homo sapiens
tgatgttgcttacat

SEQ ID NO: 2121280 - DNA, 15 bp, Homo sapiens
gatgttgcttacatg

SEQ ID NO: 2121281 - DNA, 15 bp, Homo sapiens
atgttgcttacatgg

SEQ ID NO: 2121282 - DNA, 15 bp, Homo sapiens
tgttgcttacatggg

SEQ ID NO: 2121283 - DNA, 15 bp, Homo sapiens
gttgcttacatgggt

SEQ ID NO: 2121284 - DNA, 15 bp, Homo sapiens
ttgcttacatgggtg

SEQ ID NO: 2121285 - DNA, 15 bp, Homo sapiens
tgcttacatgggtgc

SEQ ID NO: 2121286 - DNA, 15 bp, Homo sapiens
gcttacatgggtgct

SEQ ID NO: 2121287 - DNA, 15 bp, Homo sapiens
cttacatgggtgctc

SEQ ID NO: 2121288 - DNA, 15 bp, Homo sapiens
ttacatgggtgctct

SEQ ID NO: 2121289 - DNA, 15 bp, Homo sapiens
tacatgggtgctctg

SEQ ID NO: 2121290 - DNA, 15 bp, Homo sapiens
acatgggtgctctgg

SEQ ID NO: 2121291 - DNA, 15 bp, Homo sapiens
catgggtgctctggc

SEQ ID NO: 2121292 - DNA, 15 bp, Homo sapiens
atgggtgctctggcc

SEQ ID NO: 2121293 - DNA, 15 bp, Homo sapiens
tgggtgctctggccc

SEQ ID NO: 2121294 - DNA, 15 bp, Homo sapiens
gggtgctctggccca

SEQ ID NO: 2121295 - DNA, 15 bp, Homo sapiens
ggtgctctggcccag

SEQ ID NO: 2121296 - DNA, 15 bp, Homo sapiens
gtgctctggcccaga

SEQ ID NO: 2121297 - DNA, 15 bp, Homo sapiens
tgctctggcccagag

SEQ ID NO: 2121298 - DNA, 15 bp, Homo sapiens
gctctggcccagagg

SEQ ID NO: 2121299 - DNA, 15 bp, Homo sapiens
ctctggcccagaggc

SEQ ID NO: 2121300 - DNA, 15 bp, Homo sapiens
tctggcccagaggcc

SEQ ID NO: 2121301 - DNA, 15 bp, Homo sapiens
ctggcccagaggccc

SEQ ID NO: 2121302 - DNA, 15 bp, Homo sapiens
tggcccagaggccca

SEQ ID NO: 2121303 - DNA, 15 bp, Homo sapiens
ggcccagaggcccag

SEQ ID NO: 2121304 - DNA, 15 bp, Homo sapiens
gcccagaggcccagt

SEQ ID NO: 2121305 - DNA, 15 bp, Homo sapiens
cccagaggcccagtg

SEQ ID NO: 2121306 - DNA, 15 bp, Homo sapiens
ccagaggcccagtgc

SEQ ID NO: 2121307 - DNA, 15 bp, Homo sapiens
cagaggcccagtgca

SEQ ID NO: 2121308 - DNA, 15 bp, Homo sapiens
agaggcccagtgcag

SEQ ID NO: 2121309 - DNA, 15 bp, Homo sapiens
gaggcccagtgcagc

SEQ ID NO: 2121310 - DNA, 15 bp, Homo sapiens
aggcccagtgcagct

SEQ ID NO: 2121311 - DNA, 15 bp, Homo sapiens
ggcccagtgcagctg

SEQ ID NO: 2121312 - DNA, 15 bp, Homo sapiens
gcccagtgcagctgt

SEQ ID NO: 2121313 - DNA, 15 bp, Homo sapiens
cccagtgcagctgtt

SEQ ID NO: 2121314 - DNA, 15 bp, Homo sapiens
ccagtgcagctgttg

SEQ ID NO: 2121315 - DNA, 15 bp, Homo sapiens
cagtgcagctgttgc

SEQ ID NO: 2121316 - DNA, 15 bp, Homo sapiens
agtgcagctgttgca

SEQ ID NO: 2121317 - DNA, 15 bp, Homo sapiens
gtgcagctgttgcac

SEQ ID NO: 2121318 - DNA, 15 bp, Homo sapiens
tgcagctgttgcacc

SEQ ID NO: 2121319 - DNA, 15 bp, Homo sapiens
gcagctgttgcacct

SEQ ID NO: 2121320 - DNA, 15 bp, Homo sapiens
cagctgttgcacctg

SEQ ID NO: 2121321 - DNA, 15 bp, Homo sapiens
agctgttgcacctgt

SEQ ID NO: 2121322 - DNA, 15 bp, Homo sapiens
gctgttgcacctgtg

SEQ ID NO: 2121323 - DNA, 15 bp, Homo sapiens
ctgttgcacctgtgc

SEQ ID NO: 2121324 - DNA, 15 bp, Homo sapiens
tgttgcacctgtgcc

SEQ ID NO: 2121325 - DNA, 15 bp, Homo sapiens
gttgcacctgtgcct

SEQ ID NO: 2121326 - DNA, 15 bp, Homo sapiens
ttgcacctgtgcctg

SEQ ID NO: 2121327 - DNA, 15 bp, Homo sapiens
tgcacctgtgcctgc

SEQ ID NO: 2121328 - DNA, 15 bp, Homo sapiens
gcacctgtgcctgca

SEQ ID NO: 2121329 - DNA, 15 bp, Homo sapiens
cacctgtgcctgcaa

SEQ ID NO: 2121330 - DNA, 15 bp, Homo sapiens
acctgtgcctgcaaa

SEQ ID NO: 2121331 - DNA, 15 bp, Homo sapiens
cctgtgcctgcaaag

SEQ ID NO: 2121332 - DNA, 15 bp, Homo sapiens
ctgtgcctgcaaaga

SEQ ID NO: 2121333 - DNA, 15 bp, Homo sapiens
tgtgcctgcaaagag

SEQ ID NO: 2121334 - DNA, 15 bp, Homo sapiens
gtgcctgcaaagagc

SEQ ID NO: 2121335 - DNA, 15 bp, Homo sapiens
tgcctgcaaagagcc

SEQ ID NO: 2121336 - DNA, 15 bp, Homo sapiens
gcctgcaaagagccc

SEQ ID NO: 2121337 - DNA, 15 bp, Homo sapiens
cctgcaaagagcccc

SEQ ID NO: 2121338 - DNA, 15 bp, Homo sapiens
ctgcaaagagcccca

SEQ ID NO: 2121339 - DNA, 15 bp, Homo sapiens
tgcaaagagccccaa

SEQ ID NO: 2121340 - DNA, 15 bp, Homo sapiens
gcaaagagccccaaa

SEQ ID NO: 2121341 - DNA, 15 bp, Homo sapiens
caaagagccccaaag

SEQ ID NO: 2121342 - DNA, 15 bp, Homo sapiens
aaagagccccaaagc

SEQ ID NO: 2121343 - DNA, 15 bp, Homo sapiens
aagagccccaaagcc

SEQ ID NO: 2121344 - DNA, 15 bp, Homo sapiens
agagccccaaagccc

SEQ ID NO: 2121345 - DNA, 15 bp, Homo sapiens
gagccccaaagcccc

SEQ ID NO: 2121346 - DNA, 15 bp, Homo sapiens
ccccaaagcccctca

SEQ ID NO: 2121347 - DNA, 15 bp, Homo sapiens
cccaaagcccctcac

SEQ ID NO: 2121348 - DNA, 15 bp, Homo sapiens
ccaaagcccctcacc

SEQ ID NO: 2121349 - DNA, 15 bp, Homo sapiens
caaagcccctcacct

SEQ ID NO: 2121350 - DNA, 15 bp, Homo sapiens
aaagcccctcacctc

SEQ ID NO: 2121351 - DNA, 15 bp, Homo sapiens
aagcccctcacctca

SEQ ID NO: 2121352 - DNA, 15 bp, Homo sapiens
agcccctcacctcag

SEQ ID NO: 2121353 - DNA, 15 bp, Homo sapiens
gcccctcacctcaga

SEQ ID NO: 2121354 - DNA, 15 bp, Homo sapiens
cccctcacctcagaa

SEQ ID NO: 2121355 - DNA, 15 bp, Homo sapiens
ccctcacctcagaaa

SEQ ID NO: 2121356 - DNA, 15 bp, Homo sapiens
cctcacctcagaaat

SEQ ID NO: 2121357 - DNA, 15 bp, Homo sapiens
ctcacctcagaaatt

SEQ ID NO: 2121358 - DNA, 15 bp, Homo sapiens
tcacctcagaaattg

SEQ ID NO: 2121359 - DNA, 15 bp, Homo sapiens
cacctcagaaattga

SEQ ID NO: 2121360 - DNA, 15 bp, Homo sapiens
acctcagaaattgac

SEQ ID NO: 2121361 - DNA, 15 bp, Homo sapiens
cctcagaaattgacc

SEQ ID NO: 2121362 - DNA, 15 bp, Homo sapiens
ctcagaaattgaccc

SEQ ID NO: 2121363 - DNA, 15 bp, Homo sapiens
tcagaaattgacccc

SEQ ID NO: 2121364 - DNA, 15 bp, Homo sapiens
cagaaattgacccca

SEQ ID NO: 2121365 - DNA, 15 bp, Homo sapiens
agaaattgaccccac

SEQ ID NO: 2121366 - DNA, 15 bp, Homo sapiens
gaaattgaccccaca

SEQ ID NO: 2121367 - DNA, 15 bp, Homo sapiens
aaattgaccccacat

SEQ ID NO: 2121368 - DNA, 15 bp, Homo sapiens
aattgaccccacata

SEQ ID NO: 2121369 - DNA, 15 bp, Homo sapiens
attgaccccacatac

SEQ ID NO: 2121370 - DNA, 15 bp, Homo sapiens
ttgaccccacataca

SEQ ID NO: 2121371 - DNA, 15 bp, Homo sapiens
tgaccccacatacac

SEQ ID NO: 2121372 - DNA, 15 bp, Homo sapiens
gaccccacatacact

SEQ ID NO: 2121373 - DNA, 15 bp, Homo sapiens
accccacatacactc

SEQ ID NO: 2121374 - DNA, 15 bp, Homo sapiens
ccccacatacactca

SEQ ID NO: 2121375 - DNA, 15 bp, Homo sapiens
cccacatacactcaa

SEQ ID NO: 2121376 - DNA, 15 bp, Homo sapiens
ccacatacactcaag

SEQ ID NO: 2121377 - DNA, 15 bp, Homo sapiens
cacatacactcaagg

SEQ ID NO: 2121378 - DNA, 15 bp, Homo sapiens
acatacactcaaggc

SEQ ID NO: 2121379 - DNA, 15 bp, Homo sapiens
catacactcaaggct

SEQ ID NO: 2121380 - DNA, 15 bp, Homo sapiens
atacactcaaggctg

SEQ ID NO: 2121381 - DNA, 15 bp, Homo sapiens
tacactcaaggctga

SEQ ID NO: 2121382 - DNA, 15 bp, Homo sapiens
acactcaaggctgat

SEQ ID NO: 2121383 - DNA, 15 bp, Homo sapiens
cactcaaggctgatc

SEQ ID NO: 2121384 - DNA, 15 bp, Homo sapiens
actcaaggctgatct

SEQ ID NO: 2121385 - DNA, 15 bp, Homo sapiens
ctcaaggctgatctc

SEQ ID NO: 2121386 - DNA, 15 bp, Homo sapiens
tcaaggctgatctct

SEQ ID NO: 2121387 - DNA, 15 bp, Homo sapiens
caaggctgatctctg

SEQ ID NO: 2121388 - DNA, 15 bp, Homo sapiens
aaggctgatctctgc

SEQ ID NO: 2121389 - DNA, 15 bp, Homo sapiens
aggctgatctctgca

SEQ ID NO: 2121390 - DNA, 15 bp, Homo sapiens
ggctgatctctgcag

SEQ ID NO: 2121391 - DNA, 15 bp, Homo sapiens
gctgatctctgcagg

SEQ ID NO: 2121392 - DNA, 15 bp, Homo sapiens
ctgatctctgcagga

SEQ ID NO: 2121393 - DNA, 15 bp, Homo sapiens
tgatctctgcaggac

SEQ ID NO: 2121394 - DNA, 15 bp, Homo sapiens
gatctctgcaggact

SEQ ID NO: 2121395 - DNA, 15 bp, Homo sapiens
atctctgcaggacta

SEQ ID NO: 2121396 - DNA, 15 bp, Homo sapiens
tctctgcaggactac

SEQ ID NO: 2121397 - DNA, 15 bp, Homo sapiens
ctctgcaggactact

SEQ ID NO: 2121398 - DNA, 15 bp, Homo sapiens
tctgcaggactactg

SEQ ID NO: 2121399 - DNA, 15 bp, Homo sapiens
ctgcaggactactgc

SEQ ID NO: 2121400 - DNA, 15 bp, Homo sapiens
tgcaggactactgca

SEQ ID NO: 2121401 - DNA, 15 bp, Homo sapiens
gcaggactactgcat

SEQ ID NO: 2121402 - DNA, 15 bp, Homo sapiens
caggactactgcatg

SEQ ID NO: 2121403 - DNA, 15 bp, Homo sapiens
aggactactgcatgc

SEQ ID NO: 2121404 - DNA, 15 bp, Homo sapiens
ggactactgcatgct

SEQ ID NO: 2121405 - DNA, 15 bp, Homo sapiens
gactactgcatgctg

SEQ ID NO: 2121406 - DNA, 15 bp, Homo sapiens
actactgcatgctgc

SEQ ID NO: 2121407 - DNA, 15 bp, Homo sapiens
ctactgcatgctgcc

SEQ ID NO: 2121408 - DNA, 15 bp, Homo sapiens
tactgcatgctgcca

SEQ ID NO: 2121409 - DNA, 15 bp, Homo sapiens
actgcatgctgccag

SEQ ID NO: 2121410 - DNA, 15 bp, Homo sapiens
ctgcatgctgccagc

SEQ ID NO: 2121411 - DNA, 15 bp, Homo sapiens
tgcatgctgccagcc

SEQ ID NO: 2121412 - DNA, 15 bp, Homo sapiens
gcatgctgccagccc

SEQ ID NO: 2121413 - DNA, 15 bp, Homo sapiens
catgctgccagccct

SEQ ID NO: 2121414 - DNA, 15 bp, Homo sapiens
atgctgccagccctg

SEQ ID NO: 2121415 - DNA, 15 bp, Homo sapiens
tgctgccagccctgg

SEQ ID NO: 2121416 - DNA, 15 bp, Homo sapiens
gctgccagccctggt

SEQ ID NO: 2121417 - DNA, 15 bp, Homo sapiens
ctgccagccctggtt

SEQ ID NO: 2121418 - DNA, 15 bp, Homo sapiens
tgccagccctggttc

SEQ ID NO: 2121419 - DNA, 15 bp, Homo sapiens
gccagccctggttcc

SEQ ID NO: 2121420 - DNA, 15 bp, Homo sapiens
ccagccctggttcct

SEQ ID NO: 2121421 - DNA, 15 bp, Homo sapiens
cagccctggttcctg

SEQ ID NO: 2121422 - DNA, 15 bp, Homo sapiens
agccctggttcctgt

SEQ ID NO: 2121423 - DNA, 15 bp, Homo sapiens
gccctggttcctgta

SEQ ID NO: 2121424 - DNA, 15 bp, Homo sapiens
ccctggttcctgtag

SEQ ID NO: 2121425 - DNA, 15 bp, Homo sapiens
cctggttcctgtagt

SEQ ID NO: 2121426 - DNA, 15 bp, Homo sapiens
ctggttcctgtagtg

SEQ ID NO: 2121427 - DNA, 15 bp, Homo sapiens
tggttcctgtagtgg

SEQ ID NO: 2121428 - DNA, 15 bp, Homo sapiens
ggttcctgtagtggt

SEQ ID NO: 2121429 - DNA, 15 bp, Homo sapiens
gttcctgtagtggtg

SEQ ID NO: 2121430 - DNA, 15 bp, Homo sapiens
ttcctgtagtggtgc

SEQ ID NO: 2121431 - DNA, 15 bp, Homo sapiens
tcctgtagtggtgca

SEQ ID NO: 2121432 - DNA, 15 bp, Homo sapiens
cctgtagtggtgcat

SEQ ID NO: 2121433 - DNA, 15 bp, Homo sapiens
ctgtagtggtgcatg

SEQ ID NO: 2121434 - DNA, 15 bp, Homo sapiens
tgtagtggtgcatgc

SEQ ID NO: 2121435 - DNA, 15 bp, Homo sapiens
gtagtggtgcatgca

SEQ ID NO: 2121436 - DNA, 15 bp, Homo sapiens
tagtggtgcatgcat

SEQ ID NO: 2121437 - DNA, 15 bp, Homo sapiens
agtggtgcatgcata

SEQ ID NO: 2121438 - DNA, 15 bp, Homo sapiens
gtggtgcatgcataa

SEQ ID NO: 2121439 - DNA, 15 bp, Homo sapiens
tggtgcatgcataag

SEQ ID NO: 2121440 - DNA, 15 bp, Homo sapiens
ggtgcatgcataagc

SEQ ID NO: 2121441 - DNA, 15 bp, Homo sapiens
gtgcatgcataagcc

SEQ ID NO: 2121442 - DNA, 15 bp, Homo sapiens
tgcatgcataagcca

SEQ ID NO: 2121443 - DNA, 15 bp, Homo sapiens
gcatgcataagccac

SEQ ID NO: 2121444 - DNA, 15 bp, Homo sapiens
catgcataagccact

SEQ ID NO: 2121445 - DNA, 15 bp, Homo sapiens
atgcataagccactg

SEQ ID NO: 2121446 - DNA, 15 bp, Homo sapiens
tgcataagccactgg

SEQ ID NO: 2121447 - DNA, 15 bp, Homo sapiens
gcataagccactggt

SEQ ID NO: 2121448 - DNA, 15 bp, Homo sapiens
cataagccactggtc

SEQ ID NO: 2121449 - DNA, 15 bp, Homo sapiens
ataagccactggtcc

SEQ ID NO: 2121450 - DNA, 15 bp, Homo sapiens
taagccactggtcct

SEQ ID NO: 2121451 - DNA, 15 bp, Homo sapiens
aagccactggtcctg

SEQ ID NO: 2121452 - DNA, 15 bp, Homo sapiens
agccactggtcctgc

SEQ ID NO: 2121453 - DNA, 15 bp, Homo sapiens
gccactggtcctgcc

SEQ ID NO: 2121454 - DNA, 15 bp, Homo sapiens
ccactggtcctgccc

SEQ ID NO: 2121455 - DNA, 15 bp, Homo sapiens
cactggtcctgcccc

SEQ ID NO: 2121456 - DNA, 15 bp, Homo sapiens
actggtcctgcccca

SEQ ID NO: 2121457 - DNA, 15 bp, Homo sapiens
ctggtcctgccccat

SEQ ID NO: 2121458 - DNA, 15 bp, Homo sapiens
tggtcctgccccatg

SEQ ID NO: 2121459 - DNA, 15 bp, Homo sapiens
ggtcctgccccatgg

SEQ ID NO: 2121460 - DNA, 15 bp, Homo sapiens
gtcctgccccatggg

SEQ ID NO: 2121461 - DNA, 15 bp, Homo sapiens
tcctgccccatgggt

SEQ ID NO: 2121462 - DNA, 15 bp, Homo sapiens
cctgccccatgggtc

SEQ ID NO: 2121463 - DNA, 15 bp, Homo sapiens
ctgccccatgggtcc

SEQ ID NO: 2121464 - DNA, 15 bp, Homo sapiens
tgccccatgggtcct

SEQ ID NO: 2121465 - DNA, 15 bp, Homo sapiens
gccccatgggtcctg

SEQ ID NO: 2121466 - DNA, 15 bp, Homo sapiens
ccccatgggtcctgc

SEQ ID NO: 2121467 - DNA, 15 bp, Homo sapiens
catgggtcctgcatt

SEQ ID NO: 2121468 - DNA, 15 bp, Homo sapiens
atgggtcctgcattt

SEQ ID NO: 2121469 - DNA, 15 bp, Homo sapiens
tgggtcctgcattta

SEQ ID NO: 2121470 - DNA, 15 bp, Homo sapiens
gggtcctgcatttat

SEQ ID NO: 2121471 - DNA, 15 bp, Homo sapiens
ggtcctgcatttatc

SEQ ID NO: 2121472 - DNA, 15 bp, Homo sapiens
gtcctgcatttatca

SEQ ID NO: 2121473 - DNA, 15 bp, Homo sapiens
tcctgcatttatcac

SEQ ID NO: 2121474 - DNA, 15 bp, Homo sapiens
cctgcatttatcacc

SEQ ID NO: 2121475 - DNA, 15 bp, Homo sapiens
ctgcatttatcacca

SEQ ID NO: 2121476 - DNA, 15 bp, Homo sapiens
tgcatttatcaccat

SEQ ID NO: 2121477 - DNA, 15 bp, Homo sapiens
gcatttatcaccatg

SEQ ID NO: 2121478 - DNA, 15 bp, Homo sapiens
catttatcaccatgc

SEQ ID NO: 2121479 - DNA, 15 bp, Homo sapiens
atttatcaccatgct

SEQ ID NO: 2121480 - DNA, 15 bp, Homo sapiens
tttatcaccatgctg

SEQ ID NO: 2121481 - DNA, 15 bp, Homo sapiens
ttatcaccatgctgc

SEQ ID NO: 2121482 - DNA, 15 bp, Homo sapiens
tatcaccatgctgca

SEQ ID NO: 2121483 - DNA, 15 bp, Homo sapiens
atcaccatgctgcac

SEQ ID NO: 2121484 - DNA, 15 bp, Homo sapiens
tcaccatgctgcaca

SEQ ID NO: 2121485 - DNA, 15 bp, Homo sapiens
caccatgctgcacat

SEQ ID NO: 2121486 - DNA, 15 bp, Homo sapiens
accatgctgcacatg

SEQ ID NO: 2121487 - DNA, 15 bp, Homo sapiens
ccatgctgcacatgc

SEQ ID NO: 2121488 - DNA, 15 bp, Homo sapiens
catgctgcacatgcc

SEQ ID NO: 2121489 - DNA, 15 bp, Homo sapiens
atgctgcacatgcct

SEQ ID NO: 2121490 - DNA, 15 bp, Homo sapiens
tgctgcacatgccta

SEQ ID NO: 2121491 - DNA, 15 bp, Homo sapiens
gctgcacatgcctac

SEQ ID NO: 2121492 - DNA, 15 bp, Homo sapiens
ctgcacatgcctacc

SEQ ID NO: 2121493 - DNA, 15 bp, Homo sapiens
tgcacatgcctaccc

SEQ ID NO: 2121494 - DNA, 15 bp, Homo sapiens
gcacatgcctaccca

SEQ ID NO: 2121495 - DNA, 15 bp, Homo sapiens
cacatgcctacccac

SEQ ID NO: 2121496 - DNA, 15 bp, Homo sapiens
acatgcctacccacc

SEQ ID NO: 2121497 - DNA, 15 bp, Homo sapiens
catgcctacccacct

SEQ ID NO: 2121498 - DNA, 15 bp, Homo sapiens
atgcctacccacctc

SEQ ID NO: 2121499 - DNA, 15 bp, Homo sapiens
tgcctacccacctcc

SEQ ID NO: 2121500 - DNA, 15 bp, Homo sapiens
gcctacccacctcca

SEQ ID NO: 2121501 - DNA, 15 bp, Homo sapiens
cctacccacctccag

SEQ ID NO: 2121502 - DNA, 15 bp, Homo sapiens
ctacccacctccagt

SEQ ID NO: 2121503 - DNA, 15 bp, Homo sapiens
tacccacctccagtt

SEQ ID NO: 2121504 - DNA, 15 bp, Homo sapiens
acccacctccagttg

SEQ ID NO: 2121505 - DNA, 15 bp, Homo sapiens
cccacctccagttga

SEQ ID NO: 2121506 - DNA, 15 bp, Homo sapiens
ccacctccagttgag

SEQ ID NO: 2121507 - DNA, 15 bp, Homo sapiens
cacctccagttgagc

SEQ ID NO: 2121508 - DNA, 15 bp, Homo sapiens
acctccagttgagcc

SEQ ID NO: 2121509 - DNA, 15 bp, Homo sapiens
cctccagttgagccc

SEQ ID NO: 2121510 - DNA, 15 bp, Homo sapiens
ctccagttgagccct

SEQ ID NO: 2121511 - DNA, 15 bp, Homo sapiens
tccagttgagccctg

SEQ ID NO: 2121512 - DNA, 15 bp, Homo sapiens
ccagttgagccctgc

SEQ ID NO: 2121513 - DNA, 15 bp, Homo sapiens
cagttgagccctgca

SEQ ID NO: 2121514 - DNA, 15 bp, Homo sapiens
agttgagccctgcag

SEQ ID NO: 2121515 - DNA, 15 bp, Homo sapiens
gttgagccctgcagt

SEQ ID NO: 2121516 - DNA, 15 bp, Homo sapiens
ttgagccctgcagtt

SEQ ID NO: 2121517 - DNA, 15 bp, Homo sapiens
tgagccctgcagttg

SEQ ID NO: 2121518 - DNA, 15 bp, Homo sapiens
gagccctgcagttgc

SEQ ID NO: 2121519 - DNA, 15 bp, Homo sapiens
agccctgcagttgcc

SEQ ID NO: 2121520 - DNA, 15 bp, Homo sapiens
gccctgcagttgcca

SEQ ID NO: 2121521 - DNA, 15 bp, Homo sapiens
ccctgcagttgccac

SEQ ID NO: 2121522 - DNA, 15 bp, Homo sapiens
cctgcagttgccaca

SEQ ID NO: 2121523 - DNA, 15 bp, Homo sapiens
ctgcagttgccacac

SEQ ID NO: 2121524 - DNA, 15 bp, Homo sapiens
tgcagttgccacaca

SEQ ID NO: 2121525 - DNA, 15 bp, Homo sapiens
gcagttgccacacac

SEQ ID NO: 2121526 - DNA, 15 bp, Homo sapiens
cagttgccacacaca

SEQ ID NO: 2121527 - DNA, 15 bp, Homo sapiens
agttgccacacacac

SEQ ID NO: 2121528 - DNA, 15 bp, Homo sapiens
gttgccacacacaca

SEQ ID NO: 2121529 - DNA, 15 bp, Homo sapiens
ttgccacacacacac

SEQ ID NO: 2121530 - DNA, 15 bp, Homo sapiens
gccacacacacacaa

SEQ ID NO: 2121531 - DNA, 15 bp, Homo sapiens
ccacacacacacaaa

SEQ ID NO: 2121532 - DNA, 15 bp, Homo sapiens
cacaaacacacacat

SEQ ID NO: 2121533 - DNA, 15 bp, Homo sapiens
acaaacacacacatg

SEQ ID NO: 2121534 - DNA, 15 bp, Homo sapiens
caaacacacacatgc

SEQ ID NO: 2121535 - DNA, 15 bp, Homo sapiens
aaacacacacatgca

SEQ ID NO: 2121536 - DNA, 15 bp, Homo sapiens
aacacacacatgcag

SEQ ID NO: 2121537 - DNA, 15 bp, Homo sapiens
acacacacatgcaga

SEQ ID NO: 2121538 - DNA, 15 bp, Homo sapiens
cacacacatgcagac

SEQ ID NO: 2121539 - DNA, 15 bp, Homo sapiens
acacacatgcagaca

SEQ ID NO: 2121540 - DNA, 15 bp, Homo sapiens
cacacatgcagacag

SEQ ID NO: 2121541 - DNA, 15 bp, Homo sapiens
acacatgcagacagc

SEQ ID NO: 2121542 - DNA, 15 bp, Homo sapiens
cacatgcagacagcc

SEQ ID NO: 2121543 - DNA, 15 bp, Homo sapiens
acatgcagacagcct

SEQ ID NO: 2121544 - DNA, 15 bp, Homo sapiens
catgcagacagcctg

SEQ ID NO: 2121545 - DNA, 15 bp, Homo sapiens
atgcagacagcctga

SEQ ID NO: 2121546 - DNA, 15 bp, Homo sapiens
tgcagacagcctgac

SEQ ID NO: 2121547 - DNA, 15 bp, Homo sapiens
gcagacagcctgacc

SEQ ID NO: 2121548 - DNA, 15 bp, Homo sapiens
cagacagcctgaccc

SEQ ID NO: 2121549 - DNA, 15 bp, Homo sapiens
agacagcctgacccc

SEQ ID NO: 2121550 - DNA, 15 bp, Homo sapiens
gacagcctgacccct

SEQ ID NO: 2121551 - DNA, 15 bp, Homo sapiens
acagcctgacccctg

SEQ ID NO: 2121552 - DNA, 15 bp, Homo sapiens
cagcctgacccctgt

SEQ ID NO: 2121553 - DNA, 15 bp, Homo sapiens
agcctgacccctgtt

SEQ ID NO: 2121554 - DNA, 15 bp, Homo sapiens
gcctgacccctgttg

SEQ ID NO: 2121555 - DNA, 15 bp, Homo sapiens
cctgacccctgttgc

SEQ ID NO: 2121556 - DNA, 15 bp, Homo sapiens
ctgacccctgttgcc

SEQ ID NO: 2121557 - DNA, 15 bp, Homo sapiens
tgacccctgttgcca

SEQ ID NO: 2121558 - DNA, 15 bp, Homo sapiens
gacccctgttgccac

SEQ ID NO: 2121559 - DNA, 15 bp, Homo sapiens
acccctgttgccacc

SEQ ID NO: 2121560 - DNA, 15 bp, Homo sapiens
cccctgttgccacca

SEQ ID NO: 2121561 - DNA, 15 bp, Homo sapiens
ccctgttgccaccat

SEQ ID NO: 2121562 - DNA, 15 bp, Homo sapiens
cctgttgccaccatg

SEQ ID NO: 2121563 - DNA, 15 bp, Homo sapiens
ctgttgccaccatgc

SEQ ID NO: 2121564 - DNA, 15 bp, Homo sapiens
tgttgccaccatgca

SEQ ID NO: 2121565 - DNA, 15 bp, Homo sapiens
gttgccaccatgcat

SEQ ID NO: 2121566 - DNA, 15 bp, Homo sapiens
ttgccaccatgcatc

SEQ ID NO: 2121567 - DNA, 15 bp, Homo sapiens
tgccaccatgcatct

SEQ ID NO: 2121568 - DNA, 15 bp, Homo sapiens
gccaccatgcatctg

SEQ ID NO: 2121569 - DNA, 15 bp, Homo sapiens
ccaccatgcatctgg

SEQ ID NO: 2121570 - DNA, 15 bp, Homo sapiens
caccatgcatctggc

SEQ ID NO: 2121571 - DNA, 15 bp, Homo sapiens
accatgcatctggcc

SEQ ID NO: 2121572 - DNA, 15 bp, Homo sapiens
ccatgcatctggccc

SEQ ID NO: 2121573 - DNA, 15 bp, Homo sapiens
catgcatctggccct

SEQ ID NO: 2121574 - DNA, 15 bp, Homo sapiens
atgcatctggccctt

SEQ ID NO: 2121575 - DNA, 15 bp, Homo sapiens
tgcatctggcccttg

SEQ ID NO: 2121576 - DNA, 15 bp, Homo sapiens
gcatctggcccttgt

SEQ ID NO: 2121577 - DNA, 15 bp, Homo sapiens
catctggcccttgtg

SEQ ID NO: 2121578 - DNA, 15 bp, Homo sapiens
atctggcccttgtga

SEQ ID NO: 2121579 - DNA, 15 bp, Homo sapiens
tctggcccttgtgat

SEQ ID NO: 2121580 - DNA, 15 bp, Homo sapiens
ctggcccttgtgatc

SEQ ID NO: 2121581 - DNA, 15 bp, Homo sapiens
tggcccttgtgatca

SEQ ID NO: 2121582 - DNA, 15 bp, Homo sapiens
ggcccttgtgatcag

SEQ ID NO: 2121583 - DNA, 15 bp, Homo sapiens
gcccttgtgatcagg

SEQ ID NO: 2121584 - DNA, 15 bp, Homo sapiens
cccttgtgatcaggc

SEQ ID NO: 2121585 - DNA, 15 bp, Homo sapiens
ccttgtgatcaggca

SEQ ID NO: 2121586 - DNA, 15 bp, Homo sapiens
cttgtgatcaggcat

SEQ ID NO: 2121587 - DNA, 15 bp, Homo sapiens
ttgtgatcaggcatg

SEQ ID NO: 2121588 - DNA, 15 bp, Homo sapiens
tgtgatcaggcatgg

SEQ ID NO: 2121589 - DNA, 15 bp, Homo sapiens
gtgatcaggcatggg

SEQ ID NO: 2121590 - DNA, 15 bp, Homo sapiens
tgatcaggcatgggc

SEQ ID NO: 2121591 - DNA, 15 bp, Homo sapiens
gatcaggcatgggca

SEQ ID NO: 2121592 - DNA, 15 bp, Homo sapiens
atcaggcatgggcaa

SEQ ID NO: 2121593 - DNA, 15 bp, Homo sapiens
tcaggcatgggcaac

SEQ ID NO: 2121594 - DNA, 15 bp, Homo sapiens
caggcatgggcaacc

SEQ ID NO: 2121595 - DNA, 15 bp, Homo sapiens
aggcatgggcaacct

SEQ ID NO: 2121596 - DNA, 15 bp, Homo sapiens
ggcatgggcaacctg

SEQ ID NO: 2121597 - DNA, 15 bp, Homo sapiens
gcatgggcaacctgc

SEQ ID NO: 2121598 - DNA, 15 bp, Homo sapiens
catgggcaacctgca

SEQ ID NO: 2121599 - DNA, 15 bp, Homo sapiens
atgggcaacctgcag

SEQ ID NO: 2121600 - DNA, 15 bp, Homo sapiens
tgggcaacctgcagc

SEQ ID NO: 2121601 - DNA, 15 bp, Homo sapiens
gggcaacctgcagca

SEQ ID NO: 2121602 - DNA, 15 bp, Homo sapiens
ggcaacctgcagcac

SEQ ID NO: 2121603 - DNA, 15 bp, Homo sapiens
gcaacctgcagcacc

SEQ ID NO: 2121604 - DNA, 15 bp, Homo sapiens
caacctgcagcacct

SEQ ID NO: 2121605 - DNA, 15 bp, Homo sapiens
aacctgcagcaccta

SEQ ID NO: 2121606 - DNA, 15 bp, Homo sapiens
acctgcagcacctac

SEQ ID NO: 2121607 - DNA, 15 bp, Homo sapiens
cctgcagcacctacc

SEQ ID NO: 2121608 - DNA, 15 bp, Homo sapiens
ctgcagcacctacca

SEQ ID NO: 2121609 - DNA, 15 bp, Homo sapiens
tgcagcacctaccac

SEQ ID NO: 2121610 - DNA, 15 bp, Homo sapiens
gcagcacctaccacc

SEQ ID NO: 2121611 - DNA, 15 bp, Homo sapiens
cagcacctaccacca

SEQ ID NO: 2121612 - DNA, 15 bp, Homo sapiens
agcacctaccaccac

SEQ ID NO: 2121613 - DNA, 15 bp, Homo sapiens
gcacctaccaccaca

SEQ ID NO: 2121614 - DNA, 15 bp, Homo sapiens
cacctaccaccacat

SEQ ID NO: 2121615 - DNA, 15 bp, Homo sapiens
acctaccaccacatc

SEQ ID NO: 2121616 - DNA, 15 bp, Homo sapiens
cctaccaccacatct

SEQ ID NO: 2121617 - DNA, 15 bp, Homo sapiens
ctaccaccacatcta

SEQ ID NO: 2121618 - DNA, 15 bp, Homo sapiens
taccaccacatctat

SEQ ID NO: 2121619 - DNA, 15 bp, Homo sapiens
accaccacatctatg

SEQ ID NO: 2121620 - DNA, 15 bp, Homo sapiens
ccaccacatctatgc

SEQ ID NO: 2121621 - DNA, 15 bp, Homo sapiens
caccacatctatgct

SEQ ID NO: 2121622 - DNA, 15 bp, Homo sapiens
accacatctatgctc

SEQ ID NO: 2121623 - DNA, 15 bp, Homo sapiens
ccacatctatgctca

SEQ ID NO: 2121624 - DNA, 15 bp, Homo sapiens
cacatctatgctcac

SEQ ID NO: 2121625 - DNA, 15 bp, Homo sapiens
acatctatgctcaca

SEQ ID NO: 2121626 - DNA, 15 bp, Homo sapiens
catctatgctcacat

SEQ ID NO: 2121627 - DNA, 15 bp, Homo sapiens
atctatgctcacatt

SEQ ID NO: 2121628 - DNA, 15 bp, Homo sapiens
tctatgctcacattc

SEQ ID NO: 2121629 - DNA, 15 bp, Homo sapiens
ctatgctcacattca

SEQ ID NO: 2121630 - DNA, 15 bp, Homo sapiens
tatgctcacattcag

SEQ ID NO: 2121631 - DNA, 15 bp, Homo sapiens
atgctcacattcagg

SEQ ID NO: 2121632 - DNA, 15 bp, Homo sapiens
tgctcacattcaggc

SEQ ID NO: 2121633 - DNA, 15 bp, Homo sapiens
gctcacattcaggcc

SEQ ID NO: 2121634 - DNA, 15 bp, Homo sapiens
ctcacattcaggccc

SEQ ID NO: 2121635 - DNA, 15 bp, Homo sapiens
tcacattcaggccca

SEQ ID NO: 2121636 - DNA, 15 bp, Homo sapiens
cacattcaggcccag

SEQ ID NO: 2121637 - DNA, 15 bp, Homo sapiens
acattcaggcccagc

SEQ ID NO: 2121638 - DNA, 15 bp, Homo sapiens
cattcaggcccagct

SEQ ID NO: 2121639 - DNA, 15 bp, Homo sapiens
attcaggcccagctt

SEQ ID NO: 2121640 - DNA, 15 bp, Homo sapiens
ttcaggcccagcttc

SEQ ID NO: 2121641 - DNA, 15 bp, Homo sapiens
tcaggcccagcttcg

SEQ ID NO: 2121642 - DNA, 15 bp, Homo sapiens
caggcccagcttcgg

SEQ ID NO: 2121643 - DNA, 15 bp, Homo sapiens
aggcccagcttcggc

SEQ ID NO: 2121644 - DNA, 15 bp, Homo sapiens
ggcccagcttcggca

SEQ ID NO: 2121645 - DNA, 15 bp, Homo sapiens
gcccagcttcggcat

SEQ ID NO: 2121646 - DNA, 15 bp, Homo sapiens
cccagcttcggcata

SEQ ID NO: 2121647 - DNA, 15 bp, Homo sapiens
ccagcttcggcatat

SEQ ID NO: 2121648 - DNA, 15 bp, Homo sapiens
cagcttcggcatatg

SEQ ID NO: 2121649 - DNA, 15 bp, Homo sapiens
agcttcggcatatga

SEQ ID NO: 2121650 - DNA, 15 bp, Homo sapiens
gcttcggcatatgac

SEQ ID NO: 2121651 - DNA, 15 bp, Homo sapiens
cttcggcatatgacc

SEQ ID NO: 2121652 - DNA, 15 bp, Homo sapiens
ttcggcatatgaccc

SEQ ID NO: 2121653 - DNA, 15 bp, Homo sapiens
tcggcatatgaccca

SEQ ID NO: 2121654 - DNA, 15 bp, Homo sapiens
cggcatatgacccaa

SEQ ID NO: 2121655 - DNA, 15 bp, Homo sapiens
ggcatatgacccaag

SEQ ID NO: 2121656 - DNA, 15 bp, Homo sapiens
gcatatgacccaagc

SEQ ID NO: 2121657 - DNA, 15 bp, Homo sapiens
catatgacccaagct

SEQ ID NO: 2121658 - DNA, 15 bp, Homo sapiens
atatgacccaagctc

SEQ ID NO: 2121659 - DNA, 15 bp, Homo sapiens
tatgacccaagctct

SEQ ID NO: 2121660 - DNA, 15 bp, Homo sapiens
atgacccaagctctt

SEQ ID NO: 2121661 - DNA, 15 bp, Homo sapiens
tgacccaagctcttg

SEQ ID NO: 2121662 - DNA, 15 bp, Homo sapiens
gacccaagctcttgc

SEQ ID NO: 2121663 - DNA, 15 bp, Homo sapiens
acccaagctcttgct

SEQ ID NO: 2121664 - DNA, 15 bp, Homo sapiens
cccaagctcttgcta

SEQ ID NO: 2121665 - DNA, 15 bp, Homo sapiens
ccaagctcttgctac

SEQ ID NO: 2121666 - DNA, 15 bp, Homo sapiens
caagctcttgctacc

SEQ ID NO: 2121667 - DNA, 15 bp, Homo sapiens
aagctcttgctacca

SEQ ID NO: 2121668 - DNA, 15 bp, Homo sapiens
agctcttgctaccat

SEQ ID NO: 2121669 - DNA, 15 bp, Homo sapiens
gctcttgctaccatg

SEQ ID NO: 2121670 - DNA, 15 bp, Homo sapiens
ctcttgctaccatgt

SEQ ID NO: 2121671 - DNA, 15 bp, Homo sapiens
tcttgctaccatgtg

SEQ ID NO: 2121672 - DNA, 15 bp, Homo sapiens
cttgctaccatgtgt

SEQ ID NO: 2121673 - DNA, 15 bp, Homo sapiens
ttgctaccatgtgtg

SEQ ID NO: 2121674 - DNA, 15 bp, Homo sapiens
tgctaccatgtgtga

SEQ ID NO: 2121675 - DNA, 15 bp, Homo sapiens
gctaccatgtgtgag

SEQ ID NO: 2121676 - DNA, 15 bp, Homo sapiens
ctaccatgtgtgaga

SEQ ID NO: 2121677 - DNA, 15 bp, Homo sapiens
taccatgtgtgagac

SEQ ID NO: 2121678 - DNA, 15 bp, Homo sapiens
accatgtgtgagact

SEQ ID NO: 2121679 - DNA, 15 bp, Homo sapiens
ccatgtgtgagacta

SEQ ID NO: 2121680 - DNA, 15 bp, Homo sapiens
catgtgtgagactac

SEQ ID NO: 2121681 - DNA, 15 bp, Homo sapiens
atgtgtgagactaca

SEQ ID NO: 2121682 - DNA, 15 bp, Homo sapiens
tgtgtgagactacaa

SEQ ID NO: 2121683 - DNA, 15 bp, Homo sapiens
gtgtgagactacaac

SEQ ID NO: 2121684 - DNA, 15 bp, Homo sapiens
tgtgagactacaaca

SEQ ID NO: 2121685 - DNA, 15 bp, Homo sapiens
gtgagactacaacag

SEQ ID NO: 2121686 - DNA, 15 bp, Homo sapiens
tgagactacaacagg

SEQ ID NO: 2121687 - DNA, 15 bp, Homo sapiens
gagactacaacaggc

SEQ ID NO: 2121688 - DNA, 15 bp, Homo sapiens
agactacaacaggct

SEQ ID NO: 2121689 - DNA, 15 bp, Homo sapiens
gactacaacaggctg

SEQ ID NO: 2121690 - DNA, 15 bp, Homo sapiens
actacaacaggctgc

SEQ ID NO: 2121691 - DNA, 15 bp, Homo sapiens
ctacaacaggctgct

SEQ ID NO: 2121692 - DNA, 15 bp, Homo sapiens
tacaacaggctgctg

SEQ ID NO: 2121693 - DNA, 15 bp, Homo sapiens
acaacaggctgctgc

SEQ ID NO: 2121694 - DNA, 15 bp, Homo sapiens
caacaggctgctgct

SEQ ID NO: 2121695 - DNA, 15 bp, Homo sapiens
aacaggctgctgctg

SEQ ID NO: 2121696 - DNA, 15 bp, Homo sapiens
acaggctgctgctgc

SEQ ID NO: 2121697 - DNA, 15 bp, Homo sapiens
caggctgctgctgca

SEQ ID NO: 2121698 - DNA, 15 bp, Homo sapiens
aggctgctgctgcaa

SEQ ID NO: 2121699 - DNA, 15 bp, Homo sapiens
ggctgctgctgcaac

SEQ ID NO: 2121700 - DNA, 15 bp, Homo sapiens
gctgctgctgcaacc

SEQ ID NO: 2121701 - DNA, 15 bp, Homo sapiens
ctgctgctgcaacca

SEQ ID NO: 2121702 - DNA, 15 bp, Homo sapiens
tgctgctgcaaccag

SEQ ID NO: 2121703 - DNA, 15 bp, Homo sapiens
gctgctgcaaccaga

SEQ ID NO: 2121704 - DNA, 15 bp, Homo sapiens
ctgctgcaaccagac

SEQ ID NO: 2121705 - DNA, 15 bp, Homo sapiens
tgctgcaaccagact

SEQ ID NO: 2121706 - DNA, 15 bp, Homo sapiens
gctgcaaccagactc

SEQ ID NO: 2121707 - DNA, 15 bp, Homo sapiens
ctgcaaccagactcc

SEQ ID NO: 2121708 - DNA, 15 bp, Homo sapiens
tgcaaccagactcca

SEQ ID NO: 2121709 - DNA, 15 bp, Homo sapiens
gcaaccagactccac

SEQ ID NO: 2121710 - DNA, 15 bp, Homo sapiens
caaccagactccaca

SEQ ID NO: 2121711 - DNA, 15 bp, Homo sapiens
aaccagactccacag

SEQ ID NO: 2121712 - DNA, 15 bp, Homo sapiens
accagactccacagt

SEQ ID NO: 2121713 - DNA, 15 bp, Homo sapiens
ccagactccacagtg

SEQ ID NO: 2121714 - DNA, 15 bp, Homo sapiens
cagactccacagtgg

SEQ ID NO: 2121715 - DNA, 15 bp, Homo sapiens
agactccacagtgga

SEQ ID NO: 2121716 - DNA, 15 bp, Homo sapiens
gactccacagtggag

SEQ ID NO: 2121717 - DNA, 15 bp, Homo sapiens
actccacagtggagc

SEQ ID NO: 2121718 - DNA, 15 bp, Homo sapiens
ctccacagtggagca

SEQ ID NO: 2121719 - DNA, 15 bp, Homo sapiens
tccacagtggagcat

SEQ ID NO: 2121720 - DNA, 15 bp, Homo sapiens
ccacagtggagcatg

SEQ ID NO: 2121721 - DNA, 15 bp, Homo sapiens
cacagtggagcatgt

SEQ ID NO: 2121722 - DNA, 15 bp, Homo sapiens
acagtggagcatgtg

SEQ ID NO: 2121723 - DNA, 15 bp, Homo sapiens
cagtggagcatgtgt

SEQ ID NO: 2121724 - DNA, 15 bp, Homo sapiens
agtggagcatgtgta

SEQ ID NO: 2121725 - DNA, 15 bp, Homo sapiens
gtggagcatgtgtac

SEQ ID NO: 2121726 - DNA, 15 bp, Homo sapiens
tggagcatgtgtaca

SEQ ID NO: 2121727 - DNA, 15 bp, Homo sapiens
ggagcatgtgtacac

SEQ ID NO: 2121728 - DNA, 15 bp, Homo sapiens
gagcatgtgtacact

SEQ ID NO: 2121729 - DNA, 15 bp, Homo sapiens
agcatgtgtacactt

SEQ ID NO: 2121730 - DNA, 15 bp, Homo sapiens
gcatgtgtacacttt

SEQ ID NO: 2121731 - DNA, 15 bp, Homo sapiens
catgtgtacactttc

SEQ ID NO: 2121732 - DNA, 15 bp, Homo sapiens
atgtgtacactttca

SEQ ID NO: 2121733 - DNA, 15 bp, Homo sapiens
tgtgtacactttcag

SEQ ID NO: 2121734 - DNA, 15 bp, Homo sapiens
gtgtacactttcagc

SEQ ID NO: 2121735 - DNA, 15 bp, Homo sapiens
tgtacactttcagct

SEQ ID NO: 2121736 - DNA, 15 bp, Homo sapiens
gtacactttcagctc

SEQ ID NO: 2121737 - DNA, 15 bp, Homo sapiens
tacactttcagctct

SEQ ID NO: 2121738 - DNA, 15 bp, Homo sapiens
acactttcagctctg

SEQ ID NO: 2121739 - DNA, 15 bp, Homo sapiens
cactttcagctctgg

SEQ ID NO: 2121740 - DNA, 15 bp, Homo sapiens
actttcagctctggc

SEQ ID NO: 2121741 - DNA, 15 bp, Homo sapiens
ctttcagctctggcc

SEQ ID NO: 2121742 - DNA, 15 bp, Homo sapiens
tttcagctctggcct

SEQ ID NO: 2121743 - DNA, 15 bp, Homo sapiens
ttcagctctggcctc

SEQ ID NO: 2121744 - DNA, 15 bp, Homo sapiens
tcagctctggcctcc

SEQ ID NO: 2121745 - DNA, 15 bp, Homo sapiens
cagctctggcctcca

SEQ ID NO: 2121746 - DNA, 15 bp, Homo sapiens
agctctggcctccac

SEQ ID NO: 2121747 - DNA, 15 bp, Homo sapiens
gctctggcctccact

SEQ ID NO: 2121748 - DNA, 15 bp, Homo sapiens
ctctggcctccactg

SEQ ID NO: 2121749 - DNA, 15 bp, Homo sapiens
tctggcctccactgc

SEQ ID NO: 2121750 - DNA, 15 bp, Homo sapiens
ctggcctccactgct

SEQ ID NO: 2121751 - DNA, 15 bp, Homo sapiens
tggcctccactgctg

SEQ ID NO: 2121752 - DNA, 15 bp, Homo sapiens
ggcctccactgctgc

SEQ ID NO: 2121753 - DNA, 15 bp, Homo sapiens
gcctccactgctgcc

SEQ ID NO: 2121754 - DNA, 15 bp, Homo sapiens
cctccactgctgcca

SEQ ID NO: 2121755 - DNA, 15 bp, Homo sapiens
ctccactgctgccag

SEQ ID NO: 2121756 - DNA, 15 bp, Homo sapiens
tccactgctgccagt

SEQ ID NO: 2121757 - DNA, 15 bp, Homo sapiens
ccactgctgccagtc

SEQ ID NO: 2121758 - DNA, 15 bp, Homo sapiens
cactgctgccagtcc

SEQ ID NO: 2121759 - DNA, 15 bp, Homo sapiens
actgctgccagtccc

SEQ ID NO: 2121760 - DNA, 15 bp, Homo sapiens
ctgctgccagtccca

SEQ ID NO: 2121761 - DNA, 15 bp, Homo sapiens
tgctgccagtcccag

SEQ ID NO: 2121762 - DNA, 15 bp, Homo sapiens
gctgccagtcccaga

SEQ ID NO: 2121763 - DNA, 15 bp, Homo sapiens
ctgccagtcccagac

SEQ ID NO: 2121764 - DNA, 15 bp, Homo sapiens
tgccagtcccagacc

SEQ ID NO: 2121765 - DNA, 15 bp, Homo sapiens
gccagtcccagaccc

SEQ ID NO: 2121766 - DNA, 15 bp, Homo sapiens
ccagtcccagaccct

SEQ ID NO: 2121767 - DNA, 15 bp, Homo sapiens
cagtcccagacccta

SEQ ID NO: 2121768 - DNA, 15 bp, Homo sapiens
agtcccagaccctag

SEQ ID NO: 2121769 - DNA, 15 bp, Homo sapiens
gtcccagaccctagc

SEQ ID NO: 2121770 - DNA, 15 bp, Homo sapiens
tcccagaccctagct

SEQ ID NO: 2121771 - DNA, 15 bp, Homo sapiens
cccagaccctagctg

SEQ ID NO: 2121772 - DNA, 15 bp, Homo sapiens
ccagaccctagctgt

SEQ ID NO: 2121773 - DNA, 15 bp, Homo sapiens
cagaccctagctgtt

SEQ ID NO: 2121774 - DNA, 15 bp, Homo sapiens
agaccctagctgttt

SEQ ID NO: 2121775 - DNA, 15 bp, Homo sapiens
gaccctagctgtttg

SEQ ID NO: 2121776 - DNA, 15 bp, Homo sapiens
accctagctgtttgt

SEQ ID NO: 2121777 - DNA, 15 bp, Homo sapiens
ccctagctgtttgtc

SEQ ID NO: 2121778 - DNA, 15 bp, Homo sapiens
cctagctgtttgtca

SEQ ID NO: 2121779 - DNA, 15 bp, Homo sapiens
ctagctgtttgtcac

SEQ ID NO: 2121780 - DNA, 15 bp, Homo sapiens
tagctgtttgtcaca

SEQ ID NO: 2121781 - DNA, 15 bp, Homo sapiens
agctgtttgtcacat

SEQ ID NO: 2121782 - DNA, 15 bp, Homo sapiens
gctgtttgtcacata

SEQ ID NO: 2121783 - DNA, 15 bp, Homo sapiens
ctgtttgtcacatat

SEQ ID NO: 2121784 - DNA, 15 bp, Homo sapiens
tgtttgtcacatata

SEQ ID NO: 2121785 - DNA, 15 bp, Homo sapiens
gtttgtcacatatac

SEQ ID NO: 2121786 - DNA, 15 bp, Homo sapiens
tttgtcacatataca

SEQ ID NO: 2121787 - DNA, 15 bp, Homo sapiens
ttgtcacatatacat

SEQ ID NO: 2121788 - DNA, 15 bp, Homo sapiens
tgtcacatatacata

SEQ ID NO: 2121789 - DNA, 15 bp, Homo sapiens
gtcacatatacatag

SEQ ID NO: 2121790 - DNA, 15 bp, Homo sapiens
tcacatatacatagc

SEQ ID NO: 2121791 - DNA, 15 bp, Homo sapiens
cacatatacatagct

SEQ ID NO: 2121792 - DNA, 15 bp, Homo sapiens
acatatacatagctg

SEQ ID NO: 2121793 - DNA, 15 bp, Homo sapiens
catatacatagctga

SEQ ID NO: 2121794 - DNA, 15 bp, Homo sapiens
atatacatagctgag

SEQ ID NO: 2121795 - DNA, 15 bp, Homo sapiens
tatacatagctgagg

SEQ ID NO: 2121796 - DNA, 15 bp, Homo sapiens
atacatagctgagga

SEQ ID NO: 2121797 - DNA, 15 bp, Homo sapiens
tacatagctgaggac

SEQ ID NO: 2121798 - DNA, 15 bp, Homo sapiens
acatagctgaggacc

SEQ ID NO: 2121799 - DNA, 15 bp, Homo sapiens
catagctgaggaccc

SEQ ID NO: 2121800 - DNA, 15 bp, Homo sapiens
atagctgaggacccc

SEQ ID NO: 2121801 - DNA, 15 bp, Homo sapiens
tagctgaggacccca

SEQ ID NO: 2121802 - DNA, 15 bp, Homo sapiens
agctgaggaccccaa

SEQ ID NO: 2121803 - DNA, 15 bp, Homo sapiens
gctgaggaccccaac

SEQ ID NO: 2121804 - DNA, 15 bp, Homo sapiens
ctgaggaccccaaca

SEQ ID NO: 2121805 - DNA, 15 bp, Homo sapiens
tgaggaccccaacag

SEQ ID NO: 2121806 - DNA, 15 bp, Homo sapiens
gaggaccccaacagc

SEQ ID NO: 2121807 - DNA, 15 bp, Homo sapiens
aggaccccaacagcc

SEQ ID NO: 2121808 - DNA, 15 bp, Homo sapiens
ggaccccaacagccc

SEQ ID NO: 2121809 - DNA, 15 bp, Homo sapiens
gaccccaacagccct

SEQ ID NO: 2121810 - DNA, 15 bp, Homo sapiens
accccaacagccctc

SEQ ID NO: 2121811 - DNA, 15 bp, Homo sapiens
ccccaacagccctca

SEQ ID NO: 2121812 - DNA, 15 bp, Homo sapiens
cccaacagccctcat

SEQ ID NO: 2121813 - DNA, 15 bp, Homo sapiens
ccaacagccctcata

SEQ ID NO: 2121814 - DNA, 15 bp, Homo sapiens
caacagccctcataa

SEQ ID NO: 2121815 - DNA, 15 bp, Homo sapiens
aacagccctcataat

SEQ ID NO: 2121816 - DNA, 15 bp, Homo sapiens
acagccctcataatc

SEQ ID NO: 2121817 - DNA, 15 bp, Homo sapiens
cagccctcataatct

SEQ ID NO: 2121818 - DNA, 15 bp, Homo sapiens
agccctcataatctt

SEQ ID NO: 2121819 - DNA, 15 bp, Homo sapiens
gccctcataatcttt

SEQ ID NO: 2121820 - DNA, 15 bp, Homo sapiens
ccctcataatctttg

SEQ ID NO: 2121821 - DNA, 15 bp, Homo sapiens
cctcataatctttgc

SEQ ID NO: 2121822 - DNA, 15 bp, Homo sapiens
ctcataatctttgcg

SEQ ID NO: 2121823 - DNA, 15 bp, Homo sapiens
tcataatctttgcga

SEQ ID NO: 2121824 - DNA, 15 bp, Homo sapiens
cataatctttgcgaa

SEQ ID NO: 2121825 - DNA, 15 bp, Homo sapiens
ataatctttgcgaaa

SEQ ID NO: 2121826 - DNA, 15 bp, Homo sapiens
taatctttgcgaaac

SEQ ID NO: 2121827 - DNA, 15 bp, Homo sapiens
aatctttgcgaaact

SEQ ID NO: 2121828 - DNA, 15 bp, Homo sapiens
atctttgcgaaactc

SEQ ID NO: 2121829 - DNA, 15 bp, Homo sapiens
tctttgcgaaactcc

SEQ ID NO: 2121830 - DNA, 15 bp, Homo sapiens
ctttgcgaaactccc

SEQ ID NO: 2121831 - DNA, 15 bp, Homo sapiens
tttgcgaaactccca

SEQ ID NO: 2121832 - DNA, 15 bp, Homo sapiens
ttgcgaaactcccac

SEQ ID NO: 2121833 - DNA, 15 bp, Homo sapiens
tgcgaaactcccaca

SEQ ID NO: 2121834 - DNA, 15 bp, Homo sapiens
gcgaaactcccacag

SEQ ID NO: 2121835 - DNA, 15 bp, Homo sapiens
cgaaactcccacagc

SEQ ID NO: 2121836 - DNA, 15 bp, Homo sapiens
gaaactcccacagct

SEQ ID NO: 2121837 - DNA, 15 bp, Homo sapiens
aaactcccacagctc

SEQ ID NO: 2121838 - DNA, 15 bp, Homo sapiens
aactcccacagctct

SEQ ID NO: 2121839 - DNA, 15 bp, Homo sapiens
actcccacagctctt

SEQ ID NO: 2121840 - DNA, 15 bp, Homo sapiens
ctcccacagctcttg

SEQ ID NO: 2121841 - DNA, 15 bp, Homo sapiens
tcccacagctcttga

SEQ ID NO: 2121842 - DNA, 15 bp, Homo sapiens
cccacagctcttgac

SEQ ID NO: 2121843 - DNA, 15 bp, Homo sapiens
ccacagctcttgaca

SEQ ID NO: 2121844 - DNA, 15 bp, Homo sapiens
cacagctcttgacac

SEQ ID NO: 2121845 - DNA, 15 bp, Homo sapiens
acagctcttgacaca

SEQ ID NO: 2121846 - DNA, 15 bp, Homo sapiens
cagctcttgacacaa

SEQ ID NO: 2121847 - DNA, 15 bp, Homo sapiens
agctcttgacacaaa

SEQ ID NO: 2121848 - DNA, 15 bp, Homo sapiens
gctcttgacacaaag

SEQ ID NO: 2121849 - DNA, 15 bp, Homo sapiens
ctcttgacacaaagg

SEQ ID NO: 2121850 - DNA, 15 bp, Homo sapiens
tcttgacacaaagga

SEQ ID NO: 2121851 - DNA, 15 bp, Homo sapiens
cttgacacaaaggac

SEQ ID NO: 2121852 - DNA, 15 bp, Homo sapiens
ttgacacaaaggacc

SEQ ID NO: 2121853 - DNA, 15 bp, Homo sapiens
tgacacaaaggacca

SEQ ID NO: 2121854 - DNA, 15 bp, Homo sapiens
gacacaaaggaccat

SEQ ID NO: 2121855 - DNA, 15 bp, Homo sapiens
acacaaaggaccatg

SEQ ID NO: 2121856 - DNA, 15 bp, Homo sapiens
cacaaaggaccatgc

SEQ ID NO: 2121857 - DNA, 15 bp, Homo sapiens
acaaaggaccatgca

SEQ ID NO: 2121858 - DNA, 15 bp, Homo sapiens
caaaggaccatgcag

SEQ ID NO: 2121859 - DNA, 15 bp, Homo sapiens
aggaccatgcagttg

SEQ ID NO: 2121860 - DNA, 15 bp, Homo sapiens
ggaccatgcagttgc

SEQ ID NO: 2121861 - DNA, 15 bp, Homo sapiens
gaccatgcagttgcc

SEQ ID NO: 2121862 - DNA, 15 bp, Homo sapiens
accatgcagttgcca

SEQ ID NO: 2121863 - DNA, 15 bp, Homo sapiens
ccatgcagttgccaa

SEQ ID NO: 2121864 - DNA, 15 bp, Homo sapiens
catgcagttgccaat

SEQ ID NO: 2121865 - DNA, 15 bp, Homo sapiens
atgcagttgccaatg

SEQ ID NO: 2121866 - DNA, 15 bp, Homo sapiens
tgcagttgccaatgt

SEQ ID NO: 2121867 - DNA, 15 bp, Homo sapiens
gcagttgccaatgtt

SEQ ID NO: 2121868 - DNA, 15 bp, Homo sapiens
cagttgccaatgttg

SEQ ID NO: 2121869 - DNA, 15 bp, Homo sapiens
agttgccaatgttgt

SEQ ID NO: 2121870 - DNA, 15 bp, Homo sapiens
gttgccaatgttgta

SEQ ID NO: 2121871 - DNA, 15 bp, Homo sapiens
ttgccaatgttgtag

SEQ ID NO: 2121872 - DNA, 15 bp, Homo sapiens
tgccaatgttgtagg

SEQ ID NO: 2121873 - DNA, 15 bp, Homo sapiens
gccaatgttgtaggc

SEQ ID NO: 2121874 - DNA, 15 bp, Homo sapiens
ccaatgttgtaggca

SEQ ID NO: 2121875 - DNA, 15 bp, Homo sapiens
caatgttgtaggcat

SEQ ID NO: 2121876 - DNA, 15 bp, Homo sapiens
aatgttgtaggcatg

SEQ ID NO: 2121877 - DNA, 15 bp, Homo sapiens
atgttgtaggcatgc

SEQ ID NO: 2121878 - DNA, 15 bp, Homo sapiens
tgttgtaggcatgcc

SEQ ID NO: 2121879 - DNA, 15 bp, Homo sapiens
gttgtaggcatgcct

SEQ ID NO: 2121880 - DNA, 15 bp, Homo sapiens
ttgtaggcatgcctg

SEQ ID NO: 2121881 - DNA, 15 bp, Homo sapiens
tgtaggcatgcctga

SEQ ID NO: 2121882 - DNA, 15 bp, Homo sapiens
gtaggcatgcctgag

SEQ ID NO: 2121883 - DNA, 15 bp, Homo sapiens
taggcatgcctgagc

SEQ ID NO: 2121884 - DNA, 15 bp, Homo sapiens
aggcatgcctgagct

SEQ ID NO: 2121885 - DNA, 15 bp, Homo sapiens
ggcatgcctgagctg

SEQ ID NO: 2121886 - DNA, 15 bp, Homo sapiens
gcatgcctgagctga

SEQ ID NO: 2121887 - DNA, 15 bp, Homo sapiens
catgcctgagctgac

SEQ ID NO: 2121888 - DNA, 15 bp, Homo sapiens
atgcctgagctgact

SEQ ID NO: 2121889 - DNA, 15 bp, Homo sapiens
tgcctgagctgacta

SEQ ID NO: 2121890 - DNA, 15 bp, Homo sapiens
gcctgagctgactag

SEQ ID NO: 2121891 - DNA, 15 bp, Homo sapiens
cctgagctgactaga

SEQ ID NO: 2121892 - DNA, 15 bp, Homo sapiens
ctgagctgactagac

SEQ ID NO: 2121893 - DNA, 15 bp, Homo sapiens
tgagctgactagact

SEQ ID NO: 2121894 - DNA, 15 bp, Homo sapiens
gagctgactagactc

SEQ ID NO: 2121895 - DNA, 15 bp, Homo sapiens
agctgactagactcg

SEQ ID NO: 2121896 - DNA, 15 bp, Homo sapiens
gctgactagactcgg

SEQ ID NO: 2121897 - DNA, 15 bp, Homo sapiens
ctgactagactcggc

SEQ ID NO: 2121898 - DNA, 15 bp, Homo sapiens
tgactagactcggcc

SEQ ID NO: 2121899 - DNA, 15 bp, Homo sapiens
gactagactcggccc

SEQ ID NO: 2121900 - DNA, 15 bp, Homo sapiens
actagactcggcccc

SEQ ID NO: 2121901 - DNA, 15 bp, Homo sapiens
ctagactcggcccct

SEQ ID NO: 2121902 - DNA, 15 bp, Homo sapiens
tagactcggccccta

SEQ ID NO: 2121903 - DNA, 15 bp, Homo sapiens
agactcggcccctat

SEQ ID NO: 2121904 - DNA, 15 bp, Homo sapiens
gactcggcccctatc

SEQ ID NO: 2121905 - DNA, 15 bp, Homo sapiens
actcggcccctatct

SEQ ID NO: 2121906 - DNA, 15 bp, Homo sapiens
ctcggcccctatctg

SEQ ID NO: 2121907 - DNA, 15 bp, Homo sapiens
tcggcccctatctgc

SEQ ID NO: 2121908 - DNA, 15 bp, Homo sapiens
cggcccctatctgcc

SEQ ID NO: 2121909 - DNA, 15 bp, Homo sapiens
ggcccctatctgccg

SEQ ID NO: 2121910 - DNA, 15 bp, Homo sapiens
gcccctatctgccgc

SEQ ID NO: 2121911 - DNA, 15 bp, Homo sapiens
cccctatctgccgcc

SEQ ID NO: 2121912 - DNA, 15 bp, Homo sapiens
ccctatctgccgcca

SEQ ID NO: 2121913 - DNA, 15 bp, Homo sapiens
cctatctgccgccac

SEQ ID NO: 2121914 - DNA, 15 bp, Homo sapiens
ctatctgccgccaca

SEQ ID NO: 2121915 - DNA, 15 bp, Homo sapiens
tatctgccgccacac

SEQ ID NO: 2121916 - DNA, 15 bp, Homo sapiens
atctgccgccacacc

SEQ ID NO: 2121917 - DNA, 15 bp, Homo sapiens
tctgccgccacacca

SEQ ID NO: 2121918 - DNA, 15 bp, Homo sapiens
ctgccgccacaccac

SEQ ID NO: 2121919 - DNA, 15 bp, Homo sapiens
tgccgccacaccacc

SEQ ID NO: 2121920 - DNA, 15 bp, Homo sapiens
gccgccacaccacca

SEQ ID NO: 2121921 - DNA, 15 bp, Homo sapiens
ccgccacaccaccag

SEQ ID NO: 2121922 - DNA, 15 bp, Homo sapiens
cgccacaccaccaga

SEQ ID NO: 2121923 - DNA, 15 bp, Homo sapiens
gccacaccaccagac

SEQ ID NO: 2121924 - DNA, 15 bp, Homo sapiens
ccacaccaccagacc

SEQ ID NO: 2121925 - DNA, 15 bp, Homo sapiens
cacaccaccagaccc

SEQ ID NO: 2121926 - DNA, 15 bp, Homo sapiens
acaccaccagaccca

SEQ ID NO: 2121927 - DNA, 15 bp, Homo sapiens
caccaccagacccag

SEQ ID NO: 2121928 - DNA, 15 bp, Homo sapiens
accaccagacccaga

SEQ ID NO: 2121929 - DNA, 15 bp, Homo sapiens
ccaccagacccagag

SEQ ID NO: 2121930 - DNA, 15 bp, Homo sapiens
caccagacccagagc

SEQ ID NO: 2121931 - DNA, 15 bp, Homo sapiens
accagacccagagcc

SEQ ID NO: 2121932 - DNA, 15 bp, Homo sapiens
ccagacccagagcca

SEQ ID NO: 2121933 - DNA, 15 bp, Homo sapiens
cagacccagagccac

SEQ ID NO: 2121934 - DNA, 15 bp, Homo sapiens
agacccagagccaca

SEQ ID NO: 2121935 - DNA, 15 bp, Homo sapiens
gacccagagccacac

SEQ ID NO: 2121936 - DNA, 15 bp, Homo sapiens
acccagagccacact

SEQ ID NO: 2121937 - DNA, 15 bp, Homo sapiens
cccagagccacacta

SEQ ID NO: 2121938 - DNA, 15 bp, Homo sapiens
ccagagccacactat

SEQ ID NO: 2121939 - DNA, 15 bp, Homo sapiens
cagagccacactatg

SEQ ID NO: 2121940 - DNA, 15 bp, Homo sapiens
agagccacactatgc

SEQ ID NO: 2121941 - DNA, 15 bp, Homo sapiens
gagccacactatgcc

SEQ ID NO: 2121942 - DNA, 15 bp, Homo sapiens
agccacactatgccc

SEQ ID NO: 2121943 - DNA, 15 bp, Homo sapiens
gccacactatgcccc

SEQ ID NO: 2121944 - DNA, 15 bp, Homo sapiens
ccacactatgcccct

SEQ ID NO: 2121945 - DNA, 15 bp, Homo sapiens
cacactatgcccctg

SEQ ID NO: 2121946 - DNA, 15 bp, Homo sapiens
acactatgcccctgc

SEQ ID NO: 2121947 - DNA, 15 bp, Homo sapiens
cactatgcccctgca

SEQ ID NO: 2121948 - DNA, 15 bp, Homo sapiens
actatgcccctgcat

SEQ ID NO: 2121949 - DNA, 15 bp, Homo sapiens
ctatgcccctgcatt

SEQ ID NO: 2121950 - DNA, 15 bp, Homo sapiens
tatgcccctgcattt

SEQ ID NO: 2121951 - DNA, 15 bp, Homo sapiens
atgcccctgcatttg

SEQ ID NO: 2121952 - DNA, 15 bp, Homo sapiens
tgcccctgcatttgg

SEQ ID NO: 2121953 - DNA, 15 bp, Homo sapiens
gcccctgcatttggt

SEQ ID NO: 2121954 - DNA, 15 bp, Homo sapiens
cccctgcatttggtt

SEQ ID NO: 2121955 - DNA, 15 bp, Homo sapiens
ccctgcatttggttt

SEQ ID NO: 2121956 - DNA, 15 bp, Homo sapiens
cctgcatttggtttc

SEQ ID NO: 2121957 - DNA, 15 bp, Homo sapiens
ctgcatttggtttcc

SEQ ID NO: 2121958 - DNA, 15 bp, Homo sapiens
tgcatttggtttcct

SEQ ID NO: 2121959 - DNA, 15 bp, Homo sapiens
gcatttggtttccta

SEQ ID NO: 2121960 - DNA, 15 bp, Homo sapiens
catttggtttcctat

SEQ ID NO: 2121961 - DNA, 15 bp, Homo sapiens
atttggtttcctatg

SEQ ID NO: 2121962 - DNA, 15 bp, Homo sapiens
tttggtttcctatgg

SEQ ID NO: 2121963 - DNA, 15 bp, Homo sapiens
ttggtttcctatggt

SEQ ID NO: 2121964 - DNA, 15 bp, Homo sapiens
tggtttcctatggtc

SEQ ID NO: 2121965 - DNA, 15 bp, Homo sapiens
ggtttcctatggtct

SEQ ID NO: 2121966 - DNA, 15 bp, Homo sapiens
gtttcctatggtcta

SEQ ID NO: 2121967 - DNA, 15 bp, Homo sapiens
tttcctatggtctag

SEQ ID NO: 2121968 - DNA, 15 bp, Homo sapiens
ttcctatggtctaga

SEQ ID NO: 2121969 - DNA, 15 bp, Homo sapiens
tcctatggtctagac

SEQ ID NO: 2121970 - DNA, 15 bp, Homo sapiens
cctatggtctagacc

SEQ ID NO: 2121971 - DNA, 15 bp, Homo sapiens
ctatggtctagaccc

SEQ ID NO: 2121972 - DNA, 15 bp, Homo sapiens
tatggtctagaccca

SEQ ID NO: 2121973 - DNA, 15 bp, Homo sapiens
atggtctagacccag

SEQ ID NO: 2121974 - DNA, 15 bp, Homo sapiens
tggtctagacccagt

SEQ ID NO: 2121975 - DNA, 15 bp, Homo sapiens
ggtctagacccagtg

SEQ ID NO: 2121976 - DNA, 15 bp, Homo sapiens
gtctagacccagtgc

SEQ ID NO: 2121977 - DNA, 15 bp, Homo sapiens
tctagacccagtgcc

SEQ ID NO: 2121978 - DNA, 15 bp, Homo sapiens
ctagacccagtgcca

SEQ ID NO: 2121979 - DNA, 15 bp, Homo sapiens
tagacccagtgccac

SEQ ID NO: 2121980 - DNA, 15 bp, Homo sapiens
agacccagtgccaca

SEQ ID NO: 2121981 - DNA, 15 bp, Homo sapiens
gacccagtgccacag

SEQ ID NO: 2121982 - DNA, 15 bp, Homo sapiens
acccagtgccacagt

SEQ ID NO: 2121983 - DNA, 15 bp, Homo sapiens
cccagtgccacagtg

SEQ ID NO: 2121984 - DNA, 15 bp, Homo sapiens
ccagtgccacagtgc

SEQ ID NO: 2121985 - DNA, 15 bp, Homo sapiens
cagtgccacagtgca

SEQ ID NO: 2121986 - DNA, 15 bp, Homo sapiens
agtgccacagtgcac

SEQ ID NO: 2121987 - DNA, 15 bp, Homo sapiens
gtgccacagtgcacc

SEQ ID NO: 2121988 - DNA, 15 bp, Homo sapiens
tgccacagtgcacct

SEQ ID NO: 2121989 - DNA, 15 bp, Homo sapiens
gccacagtgcaccta

SEQ ID NO: 2121990 - DNA, 15 bp, Homo sapiens
ccacagtgcacctag

SEQ ID NO: 2121991 - DNA, 15 bp, Homo sapiens
cacagtgcacctagt

SEQ ID NO: 2121992 - DNA, 15 bp, Homo sapiens
acagtgcacctagta

SEQ ID NO: 2121993 - DNA, 15 bp, Homo sapiens
cagtgcacctagtat

SEQ ID NO: 2121994 - DNA, 15 bp, Homo sapiens
agtgcacctagtatg

SEQ ID NO: 2121995 - DNA, 15 bp, Homo sapiens
gtgcacctagtatgt

SEQ ID NO: 2121996 - DNA, 15 bp, Homo sapiens
tgcacctagtatgtc

SEQ ID NO: 2121997 - DNA, 15 bp, Homo sapiens
gcacctagtatgtct

SEQ ID NO: 2121998 - DNA, 15 bp, Homo sapiens
cacctagtatgtctc

SEQ ID NO: 2121999 - DNA, 15 bp, Homo sapiens
acctagtatgtctcc

SEQ ID NO: 2122000 - DNA, 15 bp, Homo sapiens
cctagtatgtctccc

SEQ ID NO: 2122001 - DNA, 15 bp, Homo sapiens
ctagtatgtctccct

SEQ ID NO: 2122002 - DNA, 15 bp, Homo sapiens
tagtatgtctccctt

SEQ ID NO: 2122003 - DNA, 15 bp, Homo sapiens
agtatgtctcccttt

SEQ ID NO: 2122004 - DNA, 15 bp, Homo sapiens
gtatgtctccctttt

SEQ ID NO: 2122005 - DNA, 15 bp, Homo sapiens
tatgtctcccttttt

SEQ ID NO: 2122006 - DNA, 15 bp, Homo sapiens
atgtctccctttttc

SEQ ID NO: 2122007 - DNA, 15 bp, Homo sapiens
tgtctccctttttcc

SEQ ID NO: 2122008 - DNA, 15 bp, Homo sapiens
gtctccctttttcct

SEQ ID NO: 2122009 - DNA, 15 bp, Homo sapiens
tctccctttttcctc

SEQ ID NO: 2122010 - DNA, 15 bp, Homo sapiens
ctccctttttcctcc

SEQ ID NO: 2122011 - DNA, 15 bp, Homo sapiens
tccctttttcctcct

SEQ ID NO: 2122012 - DNA, 15 bp, Homo sapiens
ccctttttcctcctt

SEQ ID NO: 2122013 - DNA, 15 bp, Homo sapiens
cctttttcctcctta

SEQ ID NO: 2122014 - DNA, 15 bp, Homo sapiens
ctttttcctccttag

SEQ ID NO: 2122015 - DNA, 15 bp, Homo sapiens
tttttcctccttagg

SEQ ID NO: 2122016 - DNA, 15 bp, Homo sapiens
ttttcctccttaggt

SEQ ID NO: 2122017 - DNA, 15 bp, Homo sapiens
tttcctccttaggta

SEQ ID NO: 2122018 - DNA, 15 bp, Homo sapiens
ttcctccttaggtaa

SEQ ID NO: 2122019 - DNA, 15 bp, Homo sapiens
tcctccttaggtaaa

SEQ ID NO: 2122020 - DNA, 15 bp, Homo sapiens
cctccttaggtaaag

SEQ ID NO: 2122021 - DNA, 15 bp, Homo sapiens
ctccttaggtaaagg

SEQ ID NO: 2122022 - DNA, 15 bp, Homo sapiens
tccttaggtaaaggg

SEQ ID NO: 2122023 - DNA, 15 bp, Homo sapiens
ccttaggtaaagggc

SEQ ID NO: 2122024 - DNA, 15 bp, Homo sapiens
cttaggtaaagggct

SEQ ID NO: 2122025 - DNA, 15 bp, Homo sapiens
ttaggtaaagggctt

SEQ ID NO: 2122026 - DNA, 15 bp, Homo sapiens
taggtaaagggcttt

SEQ ID NO: 2122027 - DNA, 15 bp, Homo sapiens
aggtaaagggctttc

SEQ ID NO: 2122028 - DNA, 15 bp, Homo sapiens
ggtaaagggctttcc

SEQ ID NO: 2122029 - DNA, 15 bp, Homo sapiens
gtaaagggctttcct

SEQ ID NO: 2122030 - DNA, 15 bp, Homo sapiens
taaagggctttcctt

SEQ ID NO: 2122031 - DNA, 15 bp, Homo sapiens
aaagggctttccttg

SEQ ID NO: 2122032 - DNA, 15 bp, Homo sapiens
aagggctttccttgc

SEQ ID NO: 2122033 - DNA, 15 bp, Homo sapiens
agggctttccttgcc

SEQ ID NO: 2122034 - DNA, 15 bp, Homo sapiens
gggctttccttgcca

SEQ ID NO: 2122035 - DNA, 15 bp, Homo sapiens
ggctttccttgccaa

SEQ ID NO: 2122036 - DNA, 15 bp, Homo sapiens
gctttccttgccaaa

SEQ ID NO: 2122037 - DNA, 15 bp, Homo sapiens
ctttccttgccaaag

SEQ ID NO: 2122038 - DNA, 15 bp, Homo sapiens
tttccttgccaaagc

SEQ ID NO: 2122039 - DNA, 15 bp, Homo sapiens
ttccttgccaaagcc

SEQ ID NO: 2122040 - DNA, 15 bp, Homo sapiens
tccttgccaaagcca

SEQ ID NO: 2122041 - DNA, 15 bp, Homo sapiens
ccttgccaaagccag

SEQ ID NO: 2122042 - DNA, 15 bp, Homo sapiens
cttgccaaagccagg

SEQ ID NO: 2122043 - DNA, 15 bp, Homo sapiens
ttgccaaagccaggc

SEQ ID NO: 2122044 - DNA, 15 bp, Homo sapiens
tgccaaagccaggcc

SEQ ID NO: 2122045 - DNA, 15 bp, Homo sapiens
gccaaagccaggcca

SEQ ID NO: 2122046 - DNA, 15 bp, Homo sapiens
ccaaagccaggccat

SEQ ID NO: 2122047 - DNA, 15 bp, Homo sapiens
caaagccaggccata

SEQ ID NO: 2122048 - DNA, 15 bp, Homo sapiens
aaagccaggccataa

SEQ ID NO: 2122049 - DNA, 15 bp, Homo sapiens
aagccaggccataat

SEQ ID NO: 2122050 - DNA, 15 bp, Homo sapiens
agccaggccataatg

SEQ ID NO: 2122051 - DNA, 15 bp, Homo sapiens
gccaggccataatgt

SEQ ID NO: 2122052 - DNA, 15 bp, Homo sapiens
ccaggccataatgtc

SEQ ID NO: 2122053 - DNA, 15 bp, Homo sapiens
caggccataatgtct

SEQ ID NO: 2122054 - DNA, 15 bp, Homo sapiens
aggccataatgtctg

SEQ ID NO: 2122055 - DNA, 15 bp, Homo sapiens
ggccataatgtctga

SEQ ID NO: 2122056 - DNA, 15 bp, Homo sapiens
gccataatgtctgaa

SEQ ID NO: 2122057 - DNA, 15 bp, Homo sapiens
ccataatgtctgaaa

SEQ ID NO: 2122058 - DNA, 15 bp, Homo sapiens
cataatgtctgaaag

SEQ ID NO: 2122059 - DNA, 15 bp, Homo sapiens
ataatgtctgaaaga

SEQ ID NO: 2122060 - DNA, 15 bp, Homo sapiens
taatgtctgaaagag

SEQ ID NO: 2122061 - DNA, 15 bp, Homo sapiens
aatgtctgaaagagg

SEQ ID NO: 2122062 - DNA, 15 bp, Homo sapiens
atgtctgaaagaggt

SEQ ID NO: 2122063 - DNA, 15 bp, Homo sapiens
tgtctgaaagaggtg

SEQ ID NO: 2122064 - DNA, 15 bp, Homo sapiens
gtctgaaagaggtga

SEQ ID NO: 2122065 - DNA, 15 bp, Homo sapiens
tctgaaagaggtgac

SEQ ID NO: 2122066 - DNA, 15 bp, Homo sapiens
ctgaaagaggtgact

SEQ ID NO: 2122067 - DNA, 15 bp, Homo sapiens
tgaaagaggtgactg

SEQ ID NO: 2122068 - DNA, 15 bp, Homo sapiens
gaaagaggtgactgc

SEQ ID NO: 2122069 - DNA, 15 bp, Homo sapiens
aaagaggtgactgct

SEQ ID NO: 2122070 - DNA, 15 bp, Homo sapiens
aagaggtgactgctg

SEQ ID NO: 2122071 - DNA, 15 bp, Homo sapiens
ggtgactgctgcttc

SEQ ID NO: 2122072 - DNA, 15 bp, Homo sapiens
gtgactgctgcttca

SEQ ID NO: 2122073 - DNA, 15 bp, Homo sapiens
tgactgctgcttcaa

SEQ ID NO: 2122074 - DNA, 15 bp, Homo sapiens
gactgctgcttcaaa

SEQ ID NO: 2122075 - DNA, 15 bp, Homo sapiens
actgctgcttcaaaa

SEQ ID NO: 2122076 - DNA, 15 bp, Homo sapiens
ctgctgcttcaaaag

SEQ ID NO: 2122077 - DNA, 15 bp, Homo sapiens
tgctgcttcaaaagt

SEQ ID NO: 2122078 - DNA, 15 bp, Homo sapiens
gctgcttcaaaagtg

SEQ ID NO: 2122079 - DNA, 15 bp, Homo sapiens
ctgcttcaaaagtgc

SEQ ID NO: 2122080 - DNA, 15 bp, Homo sapiens
tgcttcaaaagtgca

SEQ ID NO: 2122081 - DNA, 15 bp, Homo sapiens
gcttcaaaagtgcag

SEQ ID NO: 2122082 - DNA, 15 bp, Homo sapiens
cttcaaaagtgcaga

SEQ ID NO: 2122083 - DNA, 15 bp, Homo sapiens
ttcaaaagtgcagac

SEQ ID NO: 2122084 - DNA, 15 bp, Homo sapiens
tcaaaagtgcagaca

SEQ ID NO: 2122085 - DNA, 15 bp, Homo sapiens
caaaagtgcagacac

SEQ ID NO: 2122086 - DNA, 15 bp, Homo sapiens
aaaagtgcagacacc

SEQ ID NO: 2122087 - DNA, 15 bp, Homo sapiens
aaagtgcagacacct

SEQ ID NO: 2122088 - DNA, 15 bp, Homo sapiens
aagtgcagacacctt

SEQ ID NO: 2122089 - DNA, 15 bp, Homo sapiens
agtgcagacaccttt

SEQ ID NO: 2122090 - DNA, 15 bp, Homo sapiens
gtgcagacacctttg

SEQ ID NO: 2122091 - DNA, 15 bp, Homo sapiens
tgcagacacctttgc

SEQ ID NO: 2122092 - DNA, 15 bp, Homo sapiens
gcagacacctttgca

SEQ ID NO: 2122093 - DNA, 15 bp, Homo sapiens
cagacacctttgcag

SEQ ID NO: 2122094 - DNA, 15 bp, Homo sapiens
agacacctttgcagg

SEQ ID NO: 2122095 - DNA, 15 bp, Homo sapiens
gacacctttgcagga

SEQ ID NO: 2122096 - DNA, 15 bp, Homo sapiens
acacctttgcaggac

SEQ ID NO: 2122097 - DNA, 15 bp, Homo sapiens
cacctttgcaggact

SEQ ID NO: 2122098 - DNA, 15 bp, Homo sapiens
acctttgcaggacta

SEQ ID NO: 2122099 - DNA, 15 bp, Homo sapiens
cctttgcaggactac

SEQ ID NO: 2122100 - DNA, 15 bp, Homo sapiens
ctttgcaggactaca

SEQ ID NO: 2122101 - DNA, 15 bp, Homo sapiens
tttgcaggactacaa

SEQ ID NO: 2122102 - DNA, 15 bp, Homo sapiens
ttgcaggactacaag

SEQ ID NO: 2122103 - DNA, 15 bp, Homo sapiens
tgcaggactacaagg

SEQ ID NO: 2122104 - DNA, 15 bp, Homo sapiens
gcaggactacaagga

SEQ ID NO: 2122105 - DNA, 15 bp, Homo sapiens
caggactacaaggat

SEQ ID NO: 2122106 - DNA, 15 bp, Homo sapiens
aggactacaaggatg

SEQ ID NO: 2122107 - DNA, 15 bp, Homo sapiens
ggactacaaggatga

SEQ ID NO: 2122108 - DNA, 15 bp, Homo sapiens
gactacaaggatgag

SEQ ID NO: 2122109 - DNA, 15 bp, Homo sapiens
actacaaggatgagg

SEQ ID NO: 2122110 - DNA, 15 bp, Homo sapiens
ctacaaggatgagga

SEQ ID NO: 2122111 - DNA, 15 bp, Homo sapiens
tacaaggatgaggaa

SEQ ID NO: 2122112 - DNA, 15 bp, Homo sapiens
acaaggatgaggaag

SEQ ID NO: 2122113 - DNA, 15 bp, Homo sapiens
caaggatgaggaaga

SEQ ID NO: 2122114 - DNA, 15 bp, Homo sapiens
aaggatgaggaagaa

SEQ ID NO: 2122115 - DNA, 15 bp, Homo sapiens
aggatgaggaagaat

SEQ ID NO: 2122116 - DNA, 15 bp, Homo sapiens
ggatgaggaagaatc

SEQ ID NO: 2122117 - DNA, 15 bp, Homo sapiens
gatgaggaagaatca

SEQ ID NO: 2122118 - DNA, 15 bp, Homo sapiens
atgaggaagaatcag

SEQ ID NO: 2122119 - DNA, 15 bp, Homo sapiens
tgaggaagaatcagg

SEQ ID NO: 2122120 - DNA, 15 bp, Homo sapiens
gaggaagaatcaggg

SEQ ID NO: 2122121 - DNA, 15 bp, Homo sapiens
aggaagaatcaggga

SEQ ID NO: 2122122 - DNA, 15 bp, Homo sapiens
ggaagaatcagggaa

SEQ ID NO: 2122123 - DNA, 15 bp, Homo sapiens
gaagaatcagggaaa

SEQ ID NO: 2122124 - DNA, 15 bp, Homo sapiens
aagaatcagggaaac

SEQ ID NO: 2122125 - DNA, 15 bp, Homo sapiens
agaatcagggaaaca

SEQ ID NO: 2122126 - DNA, 15 bp, Homo sapiens
gaatcagggaaacat

SEQ ID NO: 2122127 - DNA, 15 bp, Homo sapiens
aatcagggaaacatt

SEQ ID NO: 2122128 - DNA, 15 bp, Homo sapiens
atcagggaaacatta

SEQ ID NO: 2122129 - DNA, 15 bp, Homo sapiens
tcagggaaacattat

SEQ ID NO: 2122130 - DNA, 15 bp, Homo sapiens
cagggaaacattata

SEQ ID NO: 2122131 - DNA, 15 bp, Homo sapiens
agggaaacattatat

SEQ ID NO: 2122132 - DNA, 15 bp, Homo sapiens
gggaaacattatatt

SEQ ID NO: 2122133 - DNA, 15 bp, Homo sapiens
ggaaacattatattg

SEQ ID NO: 2122134 - DNA, 15 bp, Homo sapiens
gaaacattatattgc

SEQ ID NO: 2122135 - DNA, 15 bp, Homo sapiens
aaacattatattgcc

SEQ ID NO: 2122136 - DNA, 15 bp, Homo sapiens
acattatattgccag

SEQ ID NO: 2122137 - DNA, 15 bp, Homo sapiens
cattatattgccaga

SEQ ID NO: 2122138 - DNA, 15 bp, Homo sapiens
attatattgccagaa

SEQ ID NO: 2122139 - DNA, 15 bp, Homo sapiens
ttatattgccagaaa

SEQ ID NO: 2122140 - DNA, 15 bp, Homo sapiens
tatattgccagaaaa

SEQ ID NO: 2122141 - DNA, 15 bp, Homo sapiens
atattgccagaaaaa

SEQ ID NO: 2122142 - DNA, 15 bp, Homo sapiens
tattgccagaaaaac

SEQ ID NO: 2122143 - DNA, 15 bp, Homo sapiens
attgccagaaaaaca

SEQ ID NO: 2122144 - DNA, 15 bp, Homo sapiens
ttgccagaaaaacac

SEQ ID NO: 2122145 - DNA, 15 bp, Homo sapiens
tgccagaaaaacaca

SEQ ID NO: 2122146 - DNA, 15 bp, Homo sapiens
gccagaaaaacacaa

SEQ ID NO: 2122147 - DNA, 15 bp, Homo sapiens
ccagaaaaacacaag

SEQ ID NO: 2122148 - DNA, 15 bp, Homo sapiens
cagaaaaacacaaga

SEQ ID NO: 2122149 - DNA, 15 bp, Homo sapiens
agaaaaacacaagaa

SEQ ID NO: 2122150 - DNA, 15 bp, Homo sapiens
gaaaaacacaagaag

SEQ ID NO: 2122151 - DNA, 15 bp, Homo sapiens
aaaaacacaagaagc

SEQ ID NO: 2122152 - DNA, 15 bp, Homo sapiens
aaaacacaagaagct

SEQ ID NO: 2122153 - DNA, 15 bp, Homo sapiens
aaacacaagaagctt

SEQ ID NO: 2122154 - DNA, 15 bp, Homo sapiens
aacacaagaagcttt

SEQ ID NO: 2122155 - DNA, 15 bp, Homo sapiens
acacaagaagctttc

SEQ ID NO: 2122156 - DNA, 15 bp, Homo sapiens
cacaagaagctttcc

SEQ ID NO: 2122157 - DNA, 15 bp, Homo sapiens
acaagaagctttcca

SEQ ID NO: 2122158 - DNA, 15 bp, Homo sapiens
caagaagctttccag

SEQ ID NO: 2122159 - DNA, 15 bp, Homo sapiens
aagaagctttccagt

SEQ ID NO: 2122160 - DNA, 15 bp, Homo sapiens
agaagctttccagtg

SEQ ID NO: 2122161 - DNA, 15 bp, Homo sapiens
gaagctttccagtgt

SEQ ID NO: 2122162 - DNA, 15 bp, Homo sapiens
aagctttccagtgtg

SEQ ID NO: 2122163 - DNA, 15 bp, Homo sapiens
agctttccagtgtgt

SEQ ID NO: 2122164 - DNA, 15 bp, Homo sapiens
gctttccagtgtgtg

SEQ ID NO: 2122165 - DNA, 15 bp, Homo sapiens
ctttccagtgtgtga

SEQ ID NO: 2122166 - DNA, 15 bp, Homo sapiens
tttccagtgtgtgac

SEQ ID NO: 2122167 - DNA, 15 bp, Homo sapiens
ttccagtgtgtgacc

SEQ ID NO: 2122168 - DNA, 15 bp, Homo sapiens
tccagtgtgtgacca

SEQ ID NO: 2122169 - DNA, 15 bp, Homo sapiens
ccagtgtgtgaccac

SEQ ID NO: 2122170 - DNA, 15 bp, Homo sapiens
cagtgtgtgaccacg

SEQ ID NO: 2122171 - DNA, 15 bp, Homo sapiens
agtgtgtgaccacga

SEQ ID NO: 2122172 - DNA, 15 bp, Homo sapiens
gtgtgtgaccacgaa

SEQ ID NO: 2122173 - DNA, 15 bp, Homo sapiens
tgtgtgaccacgaag

SEQ ID NO: 2122174 - DNA, 15 bp, Homo sapiens
gtgtgaccacgaaga

SEQ ID NO: 2122175 - DNA, 15 bp, Homo sapiens
tgtgaccacgaagaa

SEQ ID NO: 2122176 - DNA, 15 bp, Homo sapiens
gtgaccacgaagaat

SEQ ID NO: 2122177 - DNA, 15 bp, Homo sapiens
tgaccacgaagaatt

SEQ ID NO: 2122178 - DNA, 15 bp, Homo sapiens
gaccacgaagaattg

SEQ ID NO: 2122179 - DNA, 15 bp, Homo sapiens
accacgaagaattgg

SEQ ID NO: 2122180 - DNA, 15 bp, Homo sapiens
ccacgaagaattgga

SEQ ID NO: 2122181 - DNA, 15 bp, Homo sapiens
cacgaagaattggag

SEQ ID NO: 2122182 - DNA, 15 bp, Homo sapiens
acgaagaattggagg

SEQ ID NO: 2122183 - DNA, 15 bp, Homo sapiens
cgaagaattggaggt

SEQ ID NO: 2122184 - DNA, 15 bp, Homo sapiens
gaagaattggaggta

SEQ ID NO: 2122185 - DNA, 15 bp, Homo sapiens
aagaattggaggtac

SEQ ID NO: 2122186 - DNA, 15 bp, Homo sapiens
agaattggaggtaca

SEQ ID NO: 2122187 - DNA, 15 bp, Homo sapiens
gaattggaggtacat

SEQ ID NO: 2122188 - DNA, 15 bp, Homo sapiens
aattggaggtacatg

SEQ ID NO: 2122189 - DNA, 15 bp, Homo sapiens
attggaggtacatga

SEQ ID NO: 2122190 - DNA, 15 bp, Homo sapiens
ttggaggtacatgaa

SEQ ID NO: 2122191 - DNA, 15 bp, Homo sapiens
tggaggtacatgaat

SEQ ID NO: 2122192 - DNA, 15 bp, Homo sapiens
ggaggtacatgaatt

SEQ ID NO: 2122193 - DNA, 15 bp, Homo sapiens
gaggtacatgaattg

SEQ ID NO: 2122194 - DNA, 15 bp, Homo sapiens
aggtacatgaattgc

SEQ ID NO: 2122195 - DNA, 15 bp, Homo sapiens
ggtacatgaattgcc

SEQ ID NO: 2122196 - DNA, 15 bp, Homo sapiens
gtacatgaattgcct

SEQ ID NO: 2122197 - DNA, 15 bp, Homo sapiens
tacatgaattgcctg

SEQ ID NO: 2122198 - DNA, 15 bp, Homo sapiens
acatgaattgcctga

SEQ ID NO: 2122199 - DNA, 15 bp, Homo sapiens
catgaattgcctgac

SEQ ID NO: 2122200 - DNA, 15 bp, Homo sapiens
atgaattgcctgaca

SEQ ID NO: 2122201 - DNA, 15 bp, Homo sapiens
tgaattgcctgacaa

SEQ ID NO: 2122202 - DNA, 15 bp, Homo sapiens
gaattgcctgacaaa

SEQ ID NO: 2122203 - DNA, 15 bp, Homo sapiens
aattgcctgacaaag

SEQ ID NO: 2122204 - DNA, 15 bp, Homo sapiens
attgcctgacaaagt

SEQ ID NO: 2122205 - DNA, 15 bp, Homo sapiens
ttgcctgacaaagta

SEQ ID NO: 2122206 - DNA, 15 bp, Homo sapiens
tgcctgacaaagtat

SEQ ID NO: 2122207 - DNA, 15 bp, Homo sapiens
gcctgacaaagtatt

SEQ ID NO: 2122208 - DNA, 15 bp, Homo sapiens
cctgacaaagtattc

SEQ ID NO: 2122209 - DNA, 15 bp, Homo sapiens
ctgacaaagtattca

SEQ ID NO: 2122210 - DNA, 15 bp, Homo sapiens
tgacaaagtattcaa

SEQ ID NO: 2122211 - DNA, 15 bp, Homo sapiens
gacaaagtattcaaa

SEQ ID NO: 2122212 - DNA, 15 bp, Homo sapiens
acaaagtattcaaaa

SEQ ID NO: 2122213 - DNA, 15 bp, Homo sapiens
caaagtattcaaaat

SEQ ID NO: 2122214 - DNA, 15 bp, Homo sapiens
aaagtattcaaaata

SEQ ID NO: 2122215 - DNA, 15 bp, Homo sapiens
aagtattcaaaataa

SEQ ID NO: 2122216 - DNA, 15 bp, Homo sapiens
agtattcaaaataat

SEQ ID NO: 2122217 - DNA, 15 bp, Homo sapiens
gtattcaaaataatt

SEQ ID NO: 2122218 - DNA, 15 bp, Homo sapiens
tattcaaaataattg

SEQ ID NO: 2122219 - DNA, 15 bp, Homo sapiens
attcaaaataattgt

SEQ ID NO: 2122220 - DNA, 15 bp, Homo sapiens
ttcaaaataattgtt

SEQ ID NO: 2122221 - DNA, 15 bp, Homo sapiens
tcaaaataattgttc

SEQ ID NO: 2122222 - DNA, 15 bp, Homo sapiens
caaaataattgttct

SEQ ID NO: 2122223 - DNA, 15 bp, Homo sapiens
aaaataattgttcta

SEQ ID NO: 2122224 - DNA, 15 bp, Homo sapiens
aaataattgttctaa

SEQ ID NO: 2122225 - DNA, 15 bp, Homo sapiens
aataattgttctaaa

SEQ ID NO: 2122226 - DNA, 15 bp, Homo sapiens
ataattgttctaaag

SEQ ID NO: 2122227 - DNA, 15 bp, Homo sapiens
taattgttctaaaga

SEQ ID NO: 2122228 - DNA, 15 bp, Homo sapiens
aattgttctaaagaa

SEQ ID NO: 2122229 - DNA, 15 bp, Homo sapiens
attgttctaaagaag

SEQ ID NO: 2122230 - DNA, 15 bp, Homo sapiens
ttgttctaaagaagc

SEQ ID NO: 2122231 - DNA, 15 bp, Homo sapiens
tgttctaaagaagct

SEQ ID NO: 2122232 - DNA, 15 bp, Homo sapiens
gttctaaagaagctc

SEQ ID NO: 2122233 - DNA, 15 bp, Homo sapiens
ttctaaagaagctca

SEQ ID NO: 2122234 - DNA, 15 bp, Homo sapiens
tctaaagaagctcag

SEQ ID NO: 2122235 - DNA, 15 bp, Homo sapiens
ctaaagaagctcagc

SEQ ID NO: 2122236 - DNA, 15 bp, Homo sapiens
taaagaagctcagca

SEQ ID NO: 2122237 - DNA, 15 bp, Homo sapiens
aaagaagctcagcaa

SEQ ID NO: 2122238 - DNA, 15 bp, Homo sapiens
aagaagctcagcaaa

SEQ ID NO: 2122239 - DNA, 15 bp, Homo sapiens
agaagctcagcaaat

SEQ ID NO: 2122240 - DNA, 15 bp, Homo sapiens
gaagctcagcaaatt

SEQ ID NO: 2122241 - DNA, 15 bp, Homo sapiens
aagctcagcaaatta

SEQ ID NO: 2122242 - DNA, 15 bp, Homo sapiens
agctcagcaaattac

SEQ ID NO: 2122243 - DNA, 15 bp, Homo sapiens
gctcagcaaattaca

SEQ ID NO: 2122244 - DNA, 15 bp, Homo sapiens
ctcagcaaattacaa

SEQ ID NO: 2122245 - DNA, 15 bp, Homo sapiens
tcagcaaattacaaa

SEQ ID NO: 2122246 - DNA, 15 bp, Homo sapiens
cagcaaattacaaaa

SEQ ID NO: 2122247 - DNA, 15 bp, Homo sapiens
agcaaattacaaaaa

SEQ ID NO: 2122248 - DNA, 15 bp, Homo sapiens
gcaaattacaaaaaa

SEQ ID NO: 2122249 - DNA, 15 bp, Homo sapiens
caaattacaaaaaaa

SEQ ID NO: 2122250 - DNA, 15 bp, Homo sapiens
aaattacaaaaaaac

SEQ ID NO: 2122251 - DNA, 15 bp, Homo sapiens
aattacaaaaaaaca

SEQ ID NO: 2122252 - DNA, 15 bp, Homo sapiens
attacaaaaaaacaa

SEQ ID NO: 2122253 - DNA, 15 bp, Homo sapiens
ttacaaaaaaacaaa

SEQ ID NO: 2122254 - DNA, 15 bp, Homo sapiens
tacaaaaaaacaaat

SEQ ID NO: 2122255 - DNA, 15 bp, Homo sapiens
acaaaaaaacaaata

SEQ ID NO: 2122256 - DNA, 15 bp, Homo sapiens
caaaaaaacaaatat

SEQ ID NO: 2122257 - DNA, 15 bp, Homo sapiens
aaaaaaacaaatatt

SEQ ID NO: 2122258 - DNA, 15 bp, Homo sapiens
aaaaaacaaatattt

SEQ ID NO: 2122259 - DNA, 15 bp, Homo sapiens
aaaaacaaatatttt

SEQ ID NO: 2122260 - DNA, 15 bp, Homo sapiens
aaaacaaatattttt

SEQ ID NO: 2122261 - DNA, 15 bp, Homo sapiens
aaacaaatattttta

SEQ ID NO: 2122262 - DNA, 15 bp, Homo sapiens
aacaaatatttttaa

SEQ ID NO: 2122263 - DNA, 15 bp, Homo sapiens
acaaatatttttaaa

SEQ ID NO: 2122264 - DNA, 15 bp, Homo sapiens
caaatatttttaaaa

SEQ ID NO: 2122265 - DNA, 15 bp, Homo sapiens
aaatatttttaaaag

SEQ ID NO: 2122266 - DNA, 15 bp, Homo sapiens
aatatttttaaaaga

SEQ ID NO: 2122267 - DNA, 15 bp, Homo sapiens
atatttttaaaagat

SEQ ID NO: 2122268 - DNA, 15 bp, Homo sapiens
tatttttaaaagatc

SEQ ID NO: 2122269 - DNA, 15 bp, Homo sapiens
atttttaaaagatca

SEQ ID NO: 2122270 - DNA, 15 bp, Homo sapiens
tttttaaaagatcag

SEQ ID NO: 2122271 - DNA, 15 bp, Homo sapiens
ttttaaaagatcagg

SEQ ID NO: 2122272 - DNA, 15 bp, Homo sapiens
tttaaaagatcagga

SEQ ID NO: 2122273 - DNA, 15 bp, Homo sapiens
ttaaaagatcaggaa

SEQ ID NO: 2122274 - DNA, 15 bp, Homo sapiens
taaaagatcaggaag

SEQ ID NO: 2122275 - DNA, 15 bp, Homo sapiens
aaaagatcaggaaga

SEQ ID NO: 2122276 - DNA, 15 bp, Homo sapiens
aaagatcaggaagac

SEQ ID NO: 2122277 - DNA, 15 bp, Homo sapiens
aagatcaggaagaca

SEQ ID NO: 2122278 - DNA, 15 bp, Homo sapiens
agatcaggaagacag

SEQ ID NO: 2122279 - DNA, 15 bp, Homo sapiens
gatcaggaagacaga

SEQ ID NO: 2122280 - DNA, 15 bp, Homo sapiens
atcaggaagacagaa

SEQ ID NO: 2122281 - DNA, 15 bp, Homo sapiens
tcaggaagacagaat

SEQ ID NO: 2122282 - DNA, 15 bp, Homo sapiens
caggaagacagaata

SEQ ID NO: 2122283 - DNA, 15 bp, Homo sapiens
aggaagacagaatat

SEQ ID NO: 2122284 - DNA, 15 bp, Homo sapiens
ggaagacagaatatg

SEQ ID NO: 2122285 - DNA, 15 bp, Homo sapiens
gaagacagaatatga

SEQ ID NO: 2122286 - DNA, 15 bp, Homo sapiens
aagacagaatatgaa

SEQ ID NO: 2122287 - DNA, 15 bp, Homo sapiens
agacagaatatgaac

SEQ ID NO: 2122288 - DNA, 15 bp, Homo sapiens
gacagaatatgaaca

SEQ ID NO: 2122289 - DNA, 15 bp, Homo sapiens
acagaatatgaacaa

SEQ ID NO: 2122290 - DNA, 15 bp, Homo sapiens
cagaatatgaacaaa

SEQ ID NO: 2122291 - DNA, 15 bp, Homo sapiens
agaatatgaacaaaa

SEQ ID NO: 2122292 - DNA, 15 bp, Homo sapiens
gaatatgaacaaaac

SEQ ID NO: 2122293 - DNA, 15 bp, Homo sapiens
aatatgaacaaaaca

SEQ ID NO: 2122294 - DNA, 15 bp, Homo sapiens
atatgaacaaaacaa

SEQ ID NO: 2122295 - DNA, 15 bp, Homo sapiens
tatgaacaaaacaag

SEQ ID NO: 2122296 - DNA, 15 bp, Homo sapiens
atgaacaaaacaaga

SEQ ID NO: 2122297 - DNA, 15 bp, Homo sapiens
tgaacaaaacaagaa

SEQ ID NO: 2122298 - DNA, 15 bp, Homo sapiens
gaacaaaacaagaag

SEQ ID NO: 2122299 - DNA, 15 bp, Homo sapiens
aacaaaacaagaagg

SEQ ID NO: 2122300 - DNA, 15 bp, Homo sapiens
acaaaacaagaaggt

SEQ ID NO: 2122301 - DNA, 15 bp, Homo sapiens
caaaacaagaaggta

SEQ ID NO: 2122302 - DNA, 15 bp, Homo sapiens
aaaacaagaaggtaa

SEQ ID NO: 2122303 - DNA, 15 bp, Homo sapiens
aaacaagaaggtaag

SEQ ID NO: 2122304 - DNA, 15 bp, Homo sapiens
aacaagaaggtaagc

SEQ ID NO: 2122305 - DNA, 15 bp, Homo sapiens
acaagaaggtaagca

SEQ ID NO: 2122306 - DNA, 15 bp, Homo sapiens
caagaaggtaagcag

SEQ ID NO: 2122307 - DNA, 15 bp, Homo sapiens
aagaaggtaagcaga

SEQ ID NO: 2122308 - DNA, 15 bp, Homo sapiens
agaaggtaagcagag

SEQ ID NO: 2122309 - DNA, 15 bp, Homo sapiens
gaaggtaagcagaga

SEQ ID NO: 2122310 - DNA, 15 bp, Homo sapiens
aaggtaagcagagat

SEQ ID NO: 2122311 - DNA, 15 bp, Homo sapiens
aggtaagcagagatt

SEQ ID NO: 2122312 - DNA, 15 bp, Homo sapiens
ggtaagcagagattc

SEQ ID NO: 2122313 - DNA, 15 bp, Homo sapiens
gtaagcagagattca

SEQ ID NO: 2122314 - DNA, 15 bp, Homo sapiens
taagcagagattcaa

SEQ ID NO: 2122315 - DNA, 15 bp, Homo sapiens
aagcagagattcaaa

SEQ ID NO: 2122316 - DNA, 15 bp, Homo sapiens
agcagagattcaaaa

SEQ ID NO: 2122317 - DNA, 15 bp, Homo sapiens
gcagagattcaaaac

SEQ ID NO: 2122318 - DNA, 15 bp, Homo sapiens
cagagattcaaaact

SEQ ID NO: 2122319 - DNA, 15 bp, Homo sapiens
agagattcaaaactt

SEQ ID NO: 2122320 - DNA, 15 bp, Homo sapiens
gagattcaaaacttg

SEQ ID NO: 2122321 - DNA, 15 bp, Homo sapiens
agattcaaaacttga

SEQ ID NO: 2122322 - DNA, 15 bp, Homo sapiens
gattcaaaacttgaa

SEQ ID NO: 2122323 - DNA, 15 bp, Homo sapiens
attcaaaacttgaaa

SEQ ID NO: 2122324 - DNA, 15 bp, Homo sapiens
ttcaaaacttgaaaa

SEQ ID NO: 2122325 - DNA, 15 bp, Homo sapiens
tcaaaacttgaaaaa

SEQ ID NO: 2122326 - DNA, 15 bp, Homo sapiens
caaaacttgaaaaaa

SEQ ID NO: 2122327 - DNA, 15 bp, Homo sapiens
aaaacttgaaaaaag

SEQ ID NO: 2122328 - DNA, 15 bp, Homo sapiens
aaacttgaaaaaaga

SEQ ID NO: 2122329 - DNA, 15 bp, Homo sapiens
aacttgaaaaaagaa

SEQ ID NO: 2122330 - DNA, 15 bp, Homo sapiens
acttgaaaaaagaac

SEQ ID NO: 2122331 - DNA, 15 bp, Homo sapiens
cttgaaaaaagaacc

SEQ ID NO: 2122332 - DNA, 15 bp, Homo sapiens
ttgaaaaaagaacca

SEQ ID NO: 2122333 - DNA, 15 bp, Homo sapiens
tgaaaaaagaaccag

SEQ ID NO: 2122334 - DNA, 15 bp, Homo sapiens
gaaaaaagaaccaga

SEQ ID NO: 2122335 - DNA, 15 bp, Homo sapiens
aaaaaagaaccagat

SEQ ID NO: 2122336 - DNA, 15 bp, Homo sapiens
aaaaagaaccagata

SEQ ID NO: 2122337 - DNA, 15 bp, Homo sapiens
aaaagaaccagataa

SEQ ID NO: 2122338 - DNA, 15 bp, Homo sapiens
aaagaaccagataaa

SEQ ID NO: 2122339 - DNA, 15 bp, Homo sapiens
aagaaccagataaat

SEQ ID NO: 2122340 - DNA, 15 bp, Homo sapiens
agaaccagataaatt

SEQ ID NO: 2122341 - DNA, 15 bp, Homo sapiens
gaaccagataaattt

SEQ ID NO: 2122342 - DNA, 15 bp, Homo sapiens
aaccagataaatttt

SEQ ID NO: 2122343 - DNA, 15 bp, Homo sapiens
accagataaattttc

SEQ ID NO: 2122344 - DNA, 15 bp, Homo sapiens
ccagataaattttca

SEQ ID NO: 2122345 - DNA, 15 bp, Homo sapiens
cagataaattttcaa

SEQ ID NO: 2122346 - DNA, 15 bp, Homo sapiens
agataaattttcaag

SEQ ID NO: 2122347 - DNA, 15 bp, Homo sapiens
gataaattttcaagc

SEQ ID NO: 2122348 - DNA, 15 bp, Homo sapiens
ataaattttcaagct

SEQ ID NO: 2122349 - DNA, 15 bp, Homo sapiens
taaattttcaagctg

SEQ ID NO: 2122350 - DNA, 15 bp, Homo sapiens
aaattttcaagctga

SEQ ID NO: 2122351 - DNA, 15 bp, Homo sapiens
aattttcaagctgaa

SEQ ID NO: 2122352 - DNA, 15 bp, Homo sapiens
attttcaagctgaac

SEQ ID NO: 2122353 - DNA, 15 bp, Homo sapiens
ttttcaagctgaaca

SEQ ID NO: 2122354 - DNA, 15 bp, Homo sapiens
tttcaagctgaacag

SEQ ID NO: 2122355 - DNA, 15 bp, Homo sapiens
ttcaagctgaacagt

SEQ ID NO: 2122356 - DNA, 15 bp, Homo sapiens
tcaagctgaacagta

SEQ ID NO: 2122357 - DNA, 15 bp, Homo sapiens
caagctgaacagtat

SEQ ID NO: 2122358 - DNA, 15 bp, Homo sapiens
aagctgaacagtatg

SEQ ID NO: 2122359 - DNA, 15 bp, Homo sapiens
agctgaacagtatga

SEQ ID NO: 2122360 - DNA, 15 bp, Homo sapiens
gctgaacagtatgat

SEQ ID NO: 2122361 - DNA, 15 bp, Homo sapiens
ctgaacagtatgatg

SEQ ID NO: 2122362 - DNA, 15 bp, Homo sapiens
tgaacagtatgatga

SEQ ID NO: 2122363 - DNA, 15 bp, Homo sapiens
gaacagtatgatgac

SEQ ID NO: 2122364 - DNA, 15 bp, Homo sapiens
aacagtatgatgact

SEQ ID NO: 2122365 - DNA, 15 bp, Homo sapiens
acagtatgatgactg

SEQ ID NO: 2122366 - DNA, 15 bp, Homo sapiens
cagtatgatgactga

SEQ ID NO: 2122367 - DNA, 15 bp, Homo sapiens
agtatgatgactgaa

SEQ ID NO: 2122368 - DNA, 15 bp, Homo sapiens
gtatgatgactgaag

SEQ ID NO: 2122369 - DNA, 15 bp, Homo sapiens
tatgatgactgaagt

SEQ ID NO: 2122370 - DNA, 15 bp, Homo sapiens
atgatgactgaagta

SEQ ID NO: 2122371 - DNA, 15 bp, Homo sapiens
tgatgactgaagtaa

SEQ ID NO: 2122372 - DNA, 15 bp, Homo sapiens
gatgactgaagtaaa

SEQ ID NO: 2122373 - DNA, 15 bp, Homo sapiens
atgactgaagtaaaa

SEQ ID NO: 2122374 - DNA, 15 bp, Homo sapiens
tgactgaagtaaaaa

SEQ ID NO: 2122375 - DNA, 15 bp, Homo sapiens
gactgaagtaaaaaa

SEQ ID NO: 2122376 - DNA, 15 bp, Homo sapiens
actgaagtaaaaaat

SEQ ID NO: 2122377 - DNA, 15 bp, Homo sapiens
ctgaagtaaaaaata

SEQ ID NO: 2122378 - DNA, 15 bp, Homo sapiens
tgaagtaaaaaatac

SEQ ID NO: 2122379 - DNA, 15 bp, Homo sapiens
gaagtaaaaaatacc

SEQ ID NO: 2122380 - DNA, 15 bp, Homo sapiens
aagtaaaaaatacca

SEQ ID NO: 2122381 - DNA, 15 bp, Homo sapiens
agtaaaaaataccaa

SEQ ID NO: 2122382 - DNA, 15 bp, Homo sapiens
gtaaaaaataccaaa

SEQ ID NO: 2122383 - DNA, 15 bp, Homo sapiens
taaaaaataccaaag

SEQ ID NO: 2122384 - DNA, 15 bp, Homo sapiens
aaaaaataccaaaga

SEQ ID NO: 2122385 - DNA, 15 bp, Homo sapiens
aaaaataccaaagat

SEQ ID NO: 2122386 - DNA, 15 bp, Homo sapiens
aaaataccaaagatg

SEQ ID NO: 2122387 - DNA, 15 bp, Homo sapiens
aaataccaaagatgc

SEQ ID NO: 2122388 - DNA, 15 bp, Homo sapiens
aataccaaagatgct

SEQ ID NO: 2122389 - DNA, 15 bp, Homo sapiens
ataccaaagatgctt

SEQ ID NO: 2122390 - DNA, 15 bp, Homo sapiens
taccaaagatgcttc

SEQ ID NO: 2122391 - DNA, 15 bp, Homo sapiens
accaaagatgcttca

SEQ ID NO: 2122392 - DNA, 15 bp, Homo sapiens
ccaaagatgcttcaa

SEQ ID NO: 2122393 - DNA, 15 bp, Homo sapiens
caaagatgcttcaat

SEQ ID NO: 2122394 - DNA, 15 bp, Homo sapiens
aaagatgcttcaata

SEQ ID NO: 2122395 - DNA, 15 bp, Homo sapiens
aagatgcttcaatag

SEQ ID NO: 2122396 - DNA, 15 bp, Homo sapiens
agatgcttcaatagc

SEQ ID NO: 2122397 - DNA, 15 bp, Homo sapiens
gatgcttcaatagca

SEQ ID NO: 2122398 - DNA, 15 bp, Homo sapiens
atgcttcaatagcag

SEQ ID NO: 2122399 - DNA, 15 bp, Homo sapiens
tgcttcaatagcaga

SEQ ID NO: 2122400 - DNA, 15 bp, Homo sapiens
gcttcaatagcagat

SEQ ID NO: 2122401 - DNA, 15 bp, Homo sapiens
cttcaatagcagatt

SEQ ID NO: 2122402 - DNA, 15 bp, Homo sapiens
ttcaatagcagatta

SEQ ID NO: 2122403 - DNA, 15 bp, Homo sapiens
tcaatagcagattac

SEQ ID NO: 2122404 - DNA, 15 bp, Homo sapiens
caatagcagattaca

SEQ ID NO: 2122405 - DNA, 15 bp, Homo sapiens
aatagcagattacat

SEQ ID NO: 2122406 - DNA, 15 bp, Homo sapiens
atagcagattacatc

SEQ ID NO: 2122407 - DNA, 15 bp, Homo sapiens
tagcagattacatca

SEQ ID NO: 2122408 - DNA, 15 bp, Homo sapiens
agcagattacatcaa

SEQ ID NO: 2122409 - DNA, 15 bp, Homo sapiens
gcagattacatcaag

SEQ ID NO: 2122410 - DNA, 15 bp, Homo sapiens
cagattacatcaagc

SEQ ID NO: 2122411 - DNA, 15 bp, Homo sapiens
agattacatcaagca

SEQ ID NO: 2122412 - DNA, 15 bp, Homo sapiens
gattacatcaagcag

SEQ ID NO: 2122413 - DNA, 15 bp, Homo sapiens
attacatcaagcaga

SEQ ID NO: 2122414 - DNA, 15 bp, Homo sapiens
ttacatcaagcagaa

SEQ ID NO: 2122415 - DNA, 15 bp, Homo sapiens
tacatcaagcagaat

SEQ ID NO: 2122416 - DNA, 15 bp, Homo sapiens
acatcaagcagaata

SEQ ID NO: 2122417 - DNA, 15 bp, Homo sapiens
catcaagcagaataa

SEQ ID NO: 2122418 - DNA, 15 bp, Homo sapiens
atcaagcagaataac

SEQ ID NO: 2122419 - DNA, 15 bp, Homo sapiens
tcaagcagaataaca

SEQ ID NO: 2122420 - DNA, 15 bp, Homo sapiens
caagcagaataacaa

SEQ ID NO: 2122421 - DNA, 15 bp, Homo sapiens
aagcagaataacaaa

SEQ ID NO: 2122422 - DNA, 15 bp, Homo sapiens
agcagaataacaaat

SEQ ID NO: 2122423 - DNA, 15 bp, Homo sapiens
gcagaataacaaata

SEQ ID NO: 2122424 - DNA, 15 bp, Homo sapiens
cagaataacaaataa

SEQ ID NO: 2122425 - DNA, 15 bp, Homo sapiens
agaataacaaataac

SEQ ID NO: 2122426 - DNA, 15 bp, Homo sapiens
gaataacaaataact

SEQ ID NO: 2122427 - DNA, 15 bp, Homo sapiens
aataacaaataactg

SEQ ID NO: 2122428 - DNA, 15 bp, Homo sapiens
ataacaaataactga

SEQ ID NO: 2122429 - DNA, 15 bp, Homo sapiens
taacaaataactgaa

SEQ ID NO: 2122430 - DNA, 15 bp, Homo sapiens
aacaaataactgaat

SEQ ID NO: 2122431 - DNA, 15 bp, Homo sapiens
acaaataactgaatg

SEQ ID NO: 2122432 - DNA, 15 bp, Homo sapiens
caaataactgaatgc

SEQ ID NO: 2122433 - DNA, 15 bp, Homo sapiens
aaataactgaatgca

SEQ ID NO: 2122434 - DNA, 15 bp, Homo sapiens
aataactgaatgcaa

SEQ ID NO: 2122435 - DNA, 15 bp, Homo sapiens
ataactgaatgcaaa

SEQ ID NO: 2122436 - DNA, 15 bp, Homo sapiens
taactgaatgcaaat

SEQ ID NO: 2122437 - DNA, 15 bp, Homo sapiens
aactgaatgcaaata

SEQ ID NO: 2122438 - DNA, 15 bp, Homo sapiens
actgaatgcaaatat

SEQ ID NO: 2122439 - DNA, 15 bp, Homo sapiens
ctgaatgcaaatata

SEQ ID NO: 2122440 - DNA, 15 bp, Homo sapiens
tgaatgcaaatatag

SEQ ID NO: 2122441 - DNA, 15 bp, Homo sapiens
gaatgcaaatataga

SEQ ID NO: 2122442 - DNA, 15 bp, Homo sapiens
aatgcaaatatagat

SEQ ID NO: 2122443 - DNA, 15 bp, Homo sapiens
atgcaaatatagatg

SEQ ID NO: 2122444 - DNA, 15 bp, Homo sapiens
tgcaaatatagatga

SEQ ID NO: 2122445 - DNA, 15 bp, Homo sapiens
gcaaatatagatgat

SEQ ID NO: 2122446 - DNA, 15 bp, Homo sapiens
caaatatagatgatt

SEQ ID NO: 2122447 - DNA, 15 bp, Homo sapiens
aaatatagatgattg

SEQ ID NO: 2122448 - DNA, 15 bp, Homo sapiens
aatatagatgattgg

SEQ ID NO: 2122449 - DNA, 15 bp, Homo sapiens
atatagatgattgga

SEQ ID NO: 2122450 - DNA, 15 bp, Homo sapiens
tatagatgattggaa

SEQ ID NO: 2122451 - DNA, 15 bp, Homo sapiens
atagatgattggaaa

SEQ ID NO: 2122452 - DNA, 15 bp, Homo sapiens
tagatgattggaaat

SEQ ID NO: 2122453 - DNA, 15 bp, Homo sapiens
agatgattggaaatc

SEQ ID NO: 2122454 - DNA, 15 bp, Homo sapiens
gatgattggaaatca

SEQ ID NO: 2122455 - DNA, 15 bp, Homo sapiens
tgattggaaatcatc

SEQ ID NO: 2122456 - DNA, 15 bp, Homo sapiens
gattggaaatcatcc

SEQ ID NO: 2122457 - DNA, 15 bp, Homo sapiens
attggaaatcatcca

SEQ ID NO: 2122458 - DNA, 15 bp, Homo sapiens
ttggaaatcatccag

SEQ ID NO: 2122459 - DNA, 15 bp, Homo sapiens
tggaaatcatccagt

SEQ ID NO: 2122460 - DNA, 15 bp, Homo sapiens
ggaaatcatccagtc

SEQ ID NO: 2122461 - DNA, 15 bp, Homo sapiens
gaaatcatccagtca

SEQ ID NO: 2122462 - DNA, 15 bp, Homo sapiens
aaatcatccagtcag

SEQ ID NO: 2122463 - DNA, 15 bp, Homo sapiens
aatcatccagtcaga

SEQ ID NO: 2122464 - DNA, 15 bp, Homo sapiens
atcatccagtcagag

SEQ ID NO: 2122465 - DNA, 15 bp, Homo sapiens
tcatccagtcagaga

SEQ ID NO: 2122466 - DNA, 15 bp, Homo sapiens
catccagtcagagaa

SEQ ID NO: 2122467 - DNA, 15 bp, Homo sapiens
atccagtcagagaag

SEQ ID NO: 2122468 - DNA, 15 bp, Homo sapiens
tccagtcagagaaga

SEQ ID NO: 2122469 - DNA, 15 bp, Homo sapiens
ccagtcagagaagaa

SEQ ID NO: 2122470 - DNA, 15 bp, Homo sapiens
cagtcagagaagaaa

SEQ ID NO: 2122471 - DNA, 15 bp, Homo sapiens
agtcagagaagaaaa

SEQ ID NO: 2122472 - DNA, 15 bp, Homo sapiens
gtcagagaagaaaaa

SEQ ID NO: 2122473 - DNA, 15 bp, Homo sapiens
tcagagaagaaaaag

SEQ ID NO: 2122474 - DNA, 15 bp, Homo sapiens
cagagaagaaaaaga

SEQ ID NO: 2122475 - DNA, 15 bp, Homo sapiens
agagaagaaaaagaa

SEQ ID NO: 2122476 - DNA, 15 bp, Homo sapiens
gagaagaaaaagaaa

SEQ ID NO: 2122477 - DNA, 15 bp, Homo sapiens
agaagaaaaagaaaa

SEQ ID NO: 2122478 - DNA, 15 bp, Homo sapiens
gaagaaaaagaaaaa

SEQ ID NO: 2122479 - DNA, 15 bp, Homo sapiens
aagaaaaagaaaaaa

SEQ ID NO: 2122480 - DNA, 15 bp, Homo sapiens
agaaaaagaaaaaaa

SEQ ID NO: 2122481 - DNA, 15 bp, Homo sapiens
gaaaaagaaaaaaaa

SEQ ID NO: 2122482 - DNA, 15 bp, Homo sapiens
aaaagaaaaaaaatg

SEQ ID NO: 2122483 - DNA, 15 bp, Homo sapiens
aaagaaaaaaaatga

SEQ ID NO: 2122484 - DNA, 15 bp, Homo sapiens
aagaaaaaaaatgaa

SEQ ID NO: 2122485 - DNA, 15 bp, Homo sapiens
aaaaaaatgaaaaag

SEQ ID NO: 2122486 - DNA, 15 bp, Homo sapiens
aaaaaatgaaaaagt

SEQ ID NO: 2122487 - DNA, 15 bp, Homo sapiens
aaaaatgaaaaagta

SEQ ID NO: 2122488 - DNA, 15 bp, Homo sapiens
aaaatgaaaaagtat

SEQ ID NO: 2122489 - DNA, 15 bp, Homo sapiens
aaatgaaaaagtatt

SEQ ID NO: 2122490 - DNA, 15 bp, Homo sapiens
aatgaaaaagtatta

SEQ ID NO: 2122491 - DNA, 15 bp, Homo sapiens
atgaaaaagtattaa

SEQ ID NO: 2122492 - DNA, 15 bp, Homo sapiens
tgaaaaagtattaag

SEQ ID NO: 2122493 - DNA, 15 bp, Homo sapiens
gaaaaagtattaaga

SEQ ID NO: 2122494 - DNA, 15 bp, Homo sapiens
aaaaagtattaagaa

SEQ ID NO: 2122495 - DNA, 15 bp, Homo sapiens
aaaagtattaagaaa

SEQ ID NO: 2122496 - DNA, 15 bp, Homo sapiens
aaagtattaagaaag

SEQ ID NO: 2122497 - DNA, 15 bp, Homo sapiens
aagtattaagaaagc

SEQ ID NO: 2122498 - DNA, 15 bp, Homo sapiens
agtattaagaaagcc

SEQ ID NO: 2122499 - DNA, 15 bp, Homo sapiens
gtattaagaaagcct

SEQ ID NO: 2122500 - DNA, 15 bp, Homo sapiens
tattaagaaagccta

SEQ ID NO: 2122501 - DNA, 15 bp, Homo sapiens
attaagaaagcctac

SEQ ID NO: 2122502 - DNA, 15 bp, Homo sapiens
ttaagaaagcctaca

SEQ ID NO: 2122503 - DNA, 15 bp, Homo sapiens
taagaaagcctacag

SEQ ID NO: 2122504 - DNA, 15 bp, Homo sapiens
aagaaagcctacagg

SEQ ID NO: 2122505 - DNA, 15 bp, Homo sapiens
agaaagcctacaggt

SEQ ID NO: 2122506 - DNA, 15 bp, Homo sapiens
gaaagcctacaggtc

SEQ ID NO: 2122507 - DNA, 15 bp, Homo sapiens
aaagcctacaggtct

SEQ ID NO: 2122508 - DNA, 15 bp, Homo sapiens
aagcctacaggtcta

SEQ ID NO: 2122509 - DNA, 15 bp, Homo sapiens
agcctacaggtctat

SEQ ID NO: 2122510 - DNA, 15 bp, Homo sapiens
gcctacaggtctatg

SEQ ID NO: 2122511 - DNA, 15 bp, Homo sapiens
cctacaggtctatgg

SEQ ID NO: 2122512 - DNA, 15 bp, Homo sapiens
ctacaggtctatggg

SEQ ID NO: 2122513 - DNA, 15 bp, Homo sapiens
tacaggtctatggga

SEQ ID NO: 2122514 - DNA, 15 bp, Homo sapiens
acaggtctatgggac

SEQ ID NO: 2122515 - DNA, 15 bp, Homo sapiens
caggtctatgggaca

SEQ ID NO: 2122516 - DNA, 15 bp, Homo sapiens
aggtctatgggacac

SEQ ID NO: 2122517 - DNA, 15 bp, Homo sapiens
ggtctatgggacacc

SEQ ID NO: 2122518 - DNA, 15 bp, Homo sapiens
gtctatgggacacca

SEQ ID NO: 2122519 - DNA, 15 bp, Homo sapiens
tctatgggacaccac

SEQ ID NO: 2122520 - DNA, 15 bp, Homo sapiens
ctatgggacaccacc

SEQ ID NO: 2122521 - DNA, 15 bp, Homo sapiens
tatgggacaccacca

SEQ ID NO: 2122522 - DNA, 15 bp, Homo sapiens
atgggacaccaccaa

SEQ ID NO: 2122523 - DNA, 15 bp, Homo sapiens
tgggacaccaccaag

SEQ ID NO: 2122524 - DNA, 15 bp, Homo sapiens
gggacaccaccaaga

SEQ ID NO: 2122525 - DNA, 15 bp, Homo sapiens
ggacaccaccaagaa

SEQ ID NO: 2122526 - DNA, 15 bp, Homo sapiens
gacaccaccaagaaa

SEQ ID NO: 2122527 - DNA, 15 bp, Homo sapiens
acaccaccaagaaaa

SEQ ID NO: 2122528 - DNA, 15 bp, Homo sapiens
caccaccaagaaaac

SEQ ID NO: 2122529 - DNA, 15 bp, Homo sapiens
accaccaagaaaact

SEQ ID NO: 2122530 - DNA, 15 bp, Homo sapiens
ccaccaagaaaacta

SEQ ID NO: 2122531 - DNA, 15 bp, Homo sapiens
caccaagaaaactac

SEQ ID NO: 2122532 - DNA, 15 bp, Homo sapiens
accaagaaaactact

SEQ ID NO: 2122533 - DNA, 15 bp, Homo sapiens
ccaagaaaactacta

SEQ ID NO: 2122534 - DNA, 15 bp, Homo sapiens
caagaaaactactat

SEQ ID NO: 2122535 - DNA, 15 bp, Homo sapiens
aagaaaactactatt

SEQ ID NO: 2122536 - DNA, 15 bp, Homo sapiens
agaaaactactattt

SEQ ID NO: 2122537 - DNA, 15 bp, Homo sapiens
gaaaactactatttg

SEQ ID NO: 2122538 - DNA, 15 bp, Homo sapiens
aaaactactatttgg

SEQ ID NO: 2122539 - DNA, 15 bp, Homo sapiens
aaactactatttgga

SEQ ID NO: 2122540 - DNA, 15 bp, Homo sapiens
aactactatttggat

SEQ ID NO: 2122541 - DNA, 15 bp, Homo sapiens
actactatttggata

SEQ ID NO: 2122542 - DNA, 15 bp, Homo sapiens
ctactatttggatac

SEQ ID NO: 2122543 - DNA, 15 bp, Homo sapiens
tactatttggatact

SEQ ID NO: 2122544 - DNA, 15 bp, Homo sapiens
actatttggatacta

SEQ ID NO: 2122545 - DNA, 15 bp, Homo sapiens
ctatttggatactaa

SEQ ID NO: 2122546 - DNA, 15 bp, Homo sapiens
tatttggatactaaa

SEQ ID NO: 2122547 - DNA, 15 bp, Homo sapiens
atttggatactaaaa

SEQ ID NO: 2122548 - DNA, 15 bp, Homo sapiens
tttggatactaaaac

SEQ ID NO: 2122549 - DNA, 15 bp, Homo sapiens
ttggatactaaaact

SEQ ID NO: 2122550 - DNA, 15 bp, Homo sapiens
tggatactaaaacta

SEQ ID NO: 2122551 - DNA, 15 bp, Homo sapiens
ggatactaaaactac

SEQ ID NO: 2122552 - DNA, 15 bp, Homo sapiens
gatactaaaactaca

SEQ ID NO: 2122553 - DNA, 15 bp, Homo sapiens
atactaaaactacag

SEQ ID NO: 2122554 - DNA, 15 bp, Homo sapiens
tactaaaactacaga

SEQ ID NO: 2122555 - DNA, 15 bp, Homo sapiens
actaaaactacagat

SEQ ID NO: 2122556 - DNA, 15 bp, Homo sapiens
ctaaaactacagatg

SEQ ID NO: 2122557 - DNA, 15 bp, Homo sapiens
taaaactacagatgg

SEQ ID NO: 2122558 - DNA, 15 bp, Homo sapiens
aaaactacagatggt

SEQ ID NO: 2122559 - DNA, 15 bp, Homo sapiens
aaactacagatggtg

SEQ ID NO: 2122560 - DNA, 15 bp, Homo sapiens
aactacagatggtga

SEQ ID NO: 2122561 - DNA, 15 bp, Homo sapiens
actacagatggtgaa

SEQ ID NO: 2122562 - DNA, 15 bp, Homo sapiens
ctacagatggtgaag

SEQ ID NO: 2122563 - DNA, 15 bp, Homo sapiens
tacagatggtgaaga

SEQ ID NO: 2122564 - DNA, 15 bp, Homo sapiens
acagatggtgaagag

SEQ ID NO: 2122565 - DNA, 15 bp, Homo sapiens
cagatggtgaagagt

SEQ ID NO: 2122566 - DNA, 15 bp, Homo sapiens
agatggtgaagagtg

SEQ ID NO: 2122567 - DNA, 15 bp, Homo sapiens
gatggtgaagagtgc

SEQ ID NO: 2122568 - DNA, 15 bp, Homo sapiens
atggtgaagagtgca

SEQ ID NO: 2122569 - DNA, 15 bp, Homo sapiens
tggtgaagagtgcaa

SEQ ID NO: 2122570 - DNA, 15 bp, Homo sapiens
ggtgaagagtgcaag

SEQ ID NO: 2122571 - DNA, 15 bp, Homo sapiens
gtgaagagtgcaaga

SEQ ID NO: 2122572 - DNA, 15 bp, Homo sapiens
tgaagagtgcaagaa

SEQ ID NO: 2122573 - DNA, 15 bp, Homo sapiens
gaagagtgcaagaaa

SEQ ID NO: 2122574 - DNA, 15 bp, Homo sapiens
aagagtgcaagaaag

SEQ ID NO: 2122575 - DNA, 15 bp, Homo sapiens
agagtgcaagaaaga

SEQ ID NO: 2122576 - DNA, 15 bp, Homo sapiens
gagtgcaagaaagag

SEQ ID NO: 2122577 - DNA, 15 bp, Homo sapiens
agtgcaagaaagagg

SEQ ID NO: 2122578 - DNA, 15 bp, Homo sapiens
gtgcaagaaagaggc

SEQ ID NO: 2122579 - DNA, 15 bp, Homo sapiens
tgcaagaaagaggca

SEQ ID NO: 2122580 - DNA, 15 bp, Homo sapiens
gcaagaaagaggcag

SEQ ID NO: 2122581 - DNA, 15 bp, Homo sapiens
caagaaagaggcaga

SEQ ID NO: 2122582 - DNA, 15 bp, Homo sapiens
aagaaagaggcagac

SEQ ID NO: 2122583 - DNA, 15 bp, Homo sapiens
agaaagaggcagaca

SEQ ID NO: 2122584 - DNA, 15 bp, Homo sapiens
gaaagaggcagacag

SEQ ID NO: 2122585 - DNA, 15 bp, Homo sapiens
aaagaggcagacagc

SEQ ID NO: 2122586 - DNA, 15 bp, Homo sapiens
aagaggcagacagct

SEQ ID NO: 2122587 - DNA, 15 bp, Homo sapiens
agaggcagacagctt

SEQ ID NO: 2122588 - DNA, 15 bp, Homo sapiens
gaggcagacagctta

SEQ ID NO: 2122589 - DNA, 15 bp, Homo sapiens
aggcagacagcttat

SEQ ID NO: 2122590 - DNA, 15 bp, Homo sapiens
ggcagacagcttatt

SEQ ID NO: 2122591 - DNA, 15 bp, Homo sapiens
gcagacagcttattt

SEQ ID NO: 2122592 - DNA, 15 bp, Homo sapiens
cagacagcttattta

SEQ ID NO: 2122593 - DNA, 15 bp, Homo sapiens
agacagcttatttaa

SEQ ID NO: 2122594 - DNA, 15 bp, Homo sapiens
gacagcttatttaaa

SEQ ID NO: 2122595 - DNA, 15 bp, Homo sapiens
acagcttatttaaag

SEQ ID NO: 2122596 - DNA, 15 bp, Homo sapiens
cagcttatttaaaga

SEQ ID NO: 2122597 - DNA, 15 bp, Homo sapiens
agcttatttaaagaa

SEQ ID NO: 2122598 - DNA, 15 bp, Homo sapiens
gcttatttaaagaaa

SEQ ID NO: 2122599 - DNA, 15 bp, Homo sapiens
cttatttaaagaaat

SEQ ID NO: 2122600 - DNA, 15 bp, Homo sapiens
ttatttaaagaaata

SEQ ID NO: 2122601 - DNA, 15 bp, Homo sapiens
tatttaaagaaataa

SEQ ID NO: 2122602 - DNA, 15 bp, Homo sapiens
atttaaagaaataat

SEQ ID NO: 2122603 - DNA, 15 bp, Homo sapiens
tttaaagaaataatg

SEQ ID NO: 2122604 - DNA, 15 bp, Homo sapiens
ttaaagaaataatgg

SEQ ID NO: 2122605 - DNA, 15 bp, Homo sapiens
taaagaaataatggc

SEQ ID NO: 2122606 - DNA, 15 bp, Homo sapiens
aaagaaataatggcc

SEQ ID NO: 2122607 - DNA, 15 bp, Homo sapiens
aagaaataatggcca

SEQ ID NO: 2122608 - DNA, 15 bp, Homo sapiens
agaaataatggccaa

SEQ ID NO: 2122609 - DNA, 15 bp, Homo sapiens
gaaataatggccaaa

SEQ ID NO: 2122610 - DNA, 15 bp, Homo sapiens
aaataatggccaaaa

SEQ ID NO: 2122611 - DNA, 15 bp, Homo sapiens
aataatggccaaaaa

SEQ ID NO: 2122612 - DNA, 15 bp, Homo sapiens
ataatggccaaaaag

SEQ ID NO: 2122613 - DNA, 15 bp, Homo sapiens
taatggccaaaaagt

SEQ ID NO: 2122614 - DNA, 15 bp, Homo sapiens
aatggccaaaaagtt

SEQ ID NO: 2122615 - DNA, 15 bp, Homo sapiens
atggccaaaaagttc

SEQ ID NO: 2122616 - DNA, 15 bp, Homo sapiens
tggccaaaaagttcc

SEQ ID NO: 2122617 - DNA, 15 bp, Homo sapiens
ggccaaaaagttccc

SEQ ID NO: 2122618 - DNA, 15 bp, Homo sapiens
gccaaaaagttccca

SEQ ID NO: 2122619 - DNA, 15 bp, Homo sapiens
ccaaaaagttcccat

SEQ ID NO: 2122620 - DNA, 15 bp, Homo sapiens
caaaaagttcccatc

SEQ ID NO: 2122621 - DNA, 15 bp, Homo sapiens
aaaaagttcccatct

SEQ ID NO: 2122622 - DNA, 15 bp, Homo sapiens
aaaagttcccatctg

SEQ ID NO: 2122623 - DNA, 15 bp, Homo sapiens
aagttcccatctggg

SEQ ID NO: 2122624 - DNA, 15 bp, Homo sapiens
agttcccatctggga

SEQ ID NO: 2122625 - DNA, 15 bp, Homo sapiens
gttcccatctgggaa

SEQ ID NO: 2122626 - DNA, 15 bp, Homo sapiens
ttcccatctgggaaa

SEQ ID NO: 2122627 - DNA, 15 bp, Homo sapiens
tcccatctgggaaaa

SEQ ID NO: 2122628 - DNA, 15 bp, Homo sapiens
cccatctgggaaaag

SEQ ID NO: 2122629 - DNA, 15 bp, Homo sapiens
ccatctgggaaaaga

SEQ ID NO: 2122630 - DNA, 15 bp, Homo sapiens
catctgggaaaagag

SEQ ID NO: 2122631 - DNA, 15 bp, Homo sapiens
atctgggaaaagaga

SEQ ID NO: 2122632 - DNA, 15 bp, Homo sapiens
tctgggaaaagagaa

SEQ ID NO: 2122633 - DNA, 15 bp, Homo sapiens
ctgggaaaagagaat

SEQ ID NO: 2122634 - DNA, 15 bp, Homo sapiens
tgggaaaagagaata

SEQ ID NO: 2122635 - DNA, 15 bp, Homo sapiens
gggaaaagagaatat

SEQ ID NO: 2122636 - DNA, 15 bp, Homo sapiens
ggaaaagagaatatt

SEQ ID NO: 2122637 - DNA, 15 bp, Homo sapiens
gaaaagagaatattg

SEQ ID NO: 2122638 - DNA, 15 bp, Homo sapiens
aaaagagaatattga

SEQ ID NO: 2122639 - DNA, 15 bp, Homo sapiens
aaagagaatattgaa

SEQ ID NO: 2122640 - DNA, 15 bp, Homo sapiens
aagagaatattgaat

SEQ ID NO: 2122641 - DNA, 15 bp, Homo sapiens
agagaatattgaatt

SEQ ID NO: 2122642 - DNA, 15 bp, Homo sapiens
gagaatattgaatta

SEQ ID NO: 2122643 - DNA, 15 bp, Homo sapiens
agaatattgaattac

SEQ ID NO: 2122644 - DNA, 15 bp, Homo sapiens
gaatattgaattaca

SEQ ID NO: 2122645 - DNA, 15 bp, Homo sapiens
aatattgaattacaa

SEQ ID NO: 2122646 - DNA, 15 bp, Homo sapiens
atattgaattacaag

SEQ ID NO: 2122647 - DNA, 15 bp, Homo sapiens
tattgaattacaaga

SEQ ID NO: 2122648 - DNA, 15 bp, Homo sapiens
attgaattacaagaa

SEQ ID NO: 2122649 - DNA, 15 bp, Homo sapiens
ttgaattacaagaag

SEQ ID NO: 2122650 - DNA, 15 bp, Homo sapiens
tgaattacaagaagc

SEQ ID NO: 2122651 - DNA, 15 bp, Homo sapiens
gaattacaagaagct

SEQ ID NO: 2122652 - DNA, 15 bp, Homo sapiens
aattacaagaagctc

SEQ ID NO: 2122653 - DNA, 15 bp, Homo sapiens
attacaagaagctca

SEQ ID NO: 2122654 - DNA, 15 bp, Homo sapiens
ttacaagaagctcag

SEQ ID NO: 2122655 - DNA, 15 bp, Homo sapiens
tacaagaagctcagg

SEQ ID NO: 2122656 - DNA, 15 bp, Homo sapiens
acaagaagctcagga

SEQ ID NO: 2122657 - DNA, 15 bp, Homo sapiens
caagaagctcaggaa

SEQ ID NO: 2122658 - DNA, 15 bp, Homo sapiens
aagaagctcaggaat

SEQ ID NO: 2122659 - DNA, 15 bp, Homo sapiens
agaagctcaggaata

SEQ ID NO: 2122660 - DNA, 15 bp, Homo sapiens
gaagctcaggaatat

SEQ ID NO: 2122661 - DNA, 15 bp, Homo sapiens
aagctcaggaatatg

SEQ ID NO: 2122662 - DNA, 15 bp, Homo sapiens
agctcaggaatatgc

SEQ ID NO: 2122663 - DNA, 15 bp, Homo sapiens
gctcaggaatatgca

SEQ ID NO: 2122664 - DNA, 15 bp, Homo sapiens
ctcaggaatatgcaa

SEQ ID NO: 2122665 - DNA, 15 bp, Homo sapiens
tcaggaatatgcaat

SEQ ID NO: 2122666 - DNA, 15 bp, Homo sapiens
caggaatatgcaatt

SEQ ID NO: 2122667 - DNA, 15 bp, Homo sapiens
aggaatatgcaatta

SEQ ID NO: 2122668 - DNA, 15 bp, Homo sapiens
ggaatatgcaattaa

SEQ ID NO: 2122669 - DNA, 15 bp, Homo sapiens
gaatatgcaattaaa

SEQ ID NO: 2122670 - DNA, 15 bp, Homo sapiens
aatatgcaattaaat

SEQ ID NO: 2122671 - DNA, 15 bp, Homo sapiens
atatgcaattaaatt

SEQ ID NO: 2122672 - DNA, 15 bp, Homo sapiens
tatgcaattaaattc

SEQ ID NO: 2122673 - DNA, 15 bp, Homo sapiens
atgcaattaaattca

SEQ ID NO: 2122674 - DNA, 15 bp, Homo sapiens
tgcaattaaattcaa

SEQ ID NO: 2122675 - DNA, 15 bp, Homo sapiens
gcaattaaattcaac

SEQ ID NO: 2122676 - DNA, 15 bp, Homo sapiens
caattaaattcaacc

SEQ ID NO: 2122677 - DNA, 15 bp, Homo sapiens
aattaaattcaaccc

SEQ ID NO: 2122678 - DNA, 15 bp, Homo sapiens
attaaattcaaccca

SEQ ID NO: 2122679 - DNA, 15 bp, Homo sapiens
ttaaattcaacccaa

SEQ ID NO: 2122680 - DNA, 15 bp, Homo sapiens
taaattcaacccaaa

SEQ ID NO: 2122681 - DNA, 15 bp, Homo sapiens
aaattcaacccaaag

SEQ ID NO: 2122682 - DNA, 15 bp, Homo sapiens
aattcaacccaaaga

SEQ ID NO: 2122683 - DNA, 15 bp, Homo sapiens
attcaacccaaagaa

SEQ ID NO: 2122684 - DNA, 15 bp, Homo sapiens
ttcaacccaaagaag

SEQ ID NO: 2122685 - DNA, 15 bp, Homo sapiens
tcaacccaaagaaga

SEQ ID NO: 2122686 - DNA, 15 bp, Homo sapiens
caacccaaagaagag

SEQ ID NO: 2122687 - DNA, 15 bp, Homo sapiens
aacccaaagaagagt

SEQ ID NO: 2122688 - DNA, 15 bp, Homo sapiens
acccaaagaagagtt

SEQ ID NO: 2122689 - DNA, 15 bp, Homo sapiens
cccaaagaagagttc

SEQ ID NO: 2122690 - DNA, 15 bp, Homo sapiens
ccaaagaagagttca

SEQ ID NO: 2122691 - DNA, 15 bp, Homo sapiens
caaagaagagttcat

SEQ ID NO: 2122692 - DNA, 15 bp, Homo sapiens
aaagaagagttcatc

SEQ ID NO: 2122693 - DNA, 15 bp, Homo sapiens
aagaagagttcatca

SEQ ID NO: 2122694 - DNA, 15 bp, Homo sapiens
agaagagttcatcaa

SEQ ID NO: 2122695 - DNA, 15 bp, Homo sapiens
gaagagttcatcaag

SEQ ID NO: 2122696 - DNA, 15 bp, Homo sapiens
aagagttcatcaaga

SEQ ID NO: 2122697 - DNA, 15 bp, Homo sapiens
agagttcatcaagac

SEQ ID NO: 2122698 - DNA, 15 bp, Homo sapiens
gagttcatcaagaca

SEQ ID NO: 2122699 - DNA, 15 bp, Homo sapiens
agttcatcaagacac

SEQ ID NO: 2122700 - DNA, 15 bp, Homo sapiens
gttcatcaagacaca

SEQ ID NO: 2122701 - DNA, 15 bp, Homo sapiens
ttcatcaagacacat

SEQ ID NO: 2122702 - DNA, 15 bp, Homo sapiens
tcatcaagacacatt

SEQ ID NO: 2122703 - DNA, 15 bp, Homo sapiens
catcaagacacatta

SEQ ID NO: 2122704 - DNA, 15 bp, Homo sapiens
atcaagacacattac

SEQ ID NO: 2122705 - DNA, 15 bp, Homo sapiens
tcaagacacattaca

SEQ ID NO: 2122706 - DNA, 15 bp, Homo sapiens
caagacacattacaa

SEQ ID NO: 2122707 - DNA, 15 bp, Homo sapiens
aagacacattacaat

SEQ ID NO: 2122708 - DNA, 15 bp, Homo sapiens
agacacattacaatc

SEQ ID NO: 2122709 - DNA, 15 bp, Homo sapiens
gacacattacaatca

SEQ ID NO: 2122710 - DNA, 15 bp, Homo sapiens
acacattacaatcaa

SEQ ID NO: 2122711 - DNA, 15 bp, Homo sapiens
cacattacaatcaaa

SEQ ID NO: 2122712 - DNA, 15 bp, Homo sapiens
acattacaatcaaac

SEQ ID NO: 2122713 - DNA, 15 bp, Homo sapiens
cattacaatcaaact

SEQ ID NO: 2122714 - DNA, 15 bp, Homo sapiens
attacaatcaaacta

SEQ ID NO: 2122715 - DNA, 15 bp, Homo sapiens
ttacaatcaaactat

SEQ ID NO: 2122716 - DNA, 15 bp, Homo sapiens
tacaatcaaactatc

SEQ ID NO: 2122717 - DNA, 15 bp, Homo sapiens
acaatcaaactatca

SEQ ID NO: 2122718 - DNA, 15 bp, Homo sapiens
caatcaaactatcaa

SEQ ID NO: 2122719 - DNA, 15 bp, Homo sapiens
aatcaaactatcaaa

SEQ ID NO: 2122720 - DNA, 15 bp, Homo sapiens
atcaaactatcaaaa

SEQ ID NO: 2122721 - DNA, 15 bp, Homo sapiens
tcaaactatcaaaat

SEQ ID NO: 2122722 - DNA, 15 bp, Homo sapiens
caaactatcaaaatt

SEQ ID NO: 2122723 - DNA, 15 bp, Homo sapiens
aaactatcaaaattc

SEQ ID NO: 2122724 - DNA, 15 bp, Homo sapiens
aactatcaaaattca

SEQ ID NO: 2122725 - DNA, 15 bp, Homo sapiens
actatcaaaattcaa

SEQ ID NO: 2122726 - DNA, 15 bp, Homo sapiens
ctatcaaaattcaaa

SEQ ID NO: 2122727 - DNA, 15 bp, Homo sapiens
tatcaaaattcaaaa

SEQ ID NO: 2122728 - DNA, 15 bp, Homo sapiens
atcaaaattcaaaaa

SEQ ID NO: 2122729 - DNA, 15 bp, Homo sapiens
tcaaaattcaaaaac

SEQ ID NO: 2122730 - DNA, 15 bp, Homo sapiens
caaaattcaaaaact

SEQ ID NO: 2122731 - DNA, 15 bp, Homo sapiens
aaaattcaaaaacta

SEQ ID NO: 2122732 - DNA, 15 bp, Homo sapiens
aaattcaaaaactaa

SEQ ID NO: 2122733 - DNA, 15 bp, Homo sapiens
aattcaaaaactaag

SEQ ID NO: 2122734 - DNA, 15 bp, Homo sapiens
attcaaaaactaaga

SEQ ID NO: 2122735 - DNA, 15 bp, Homo sapiens
ttcaaaaactaagaa

SEQ ID NO: 2122736 - DNA, 15 bp, Homo sapiens
tcaaaaactaagaaa

SEQ ID NO: 2122737 - DNA, 15 bp, Homo sapiens
caaaaactaagaaag

SEQ ID NO: 2122738 - DNA, 15 bp, Homo sapiens
aaaaactaagaaaga

SEQ ID NO: 2122739 - DNA, 15 bp, Homo sapiens
aaaactaagaaagaa

SEQ ID NO: 2122740 - DNA, 15 bp, Homo sapiens
aaactaagaaagaat

SEQ ID NO: 2122741 - DNA, 15 bp, Homo sapiens
aactaagaaagaatt

SEQ ID NO: 2122742 - DNA, 15 bp, Homo sapiens
actaagaaagaattc

SEQ ID NO: 2122743 - DNA, 15 bp, Homo sapiens
ctaagaaagaattct

SEQ ID NO: 2122744 - DNA, 15 bp, Homo sapiens
taagaaagaattctc

SEQ ID NO: 2122745 - DNA, 15 bp, Homo sapiens
aagaaagaattctca

SEQ ID NO: 2122746 - DNA, 15 bp, Homo sapiens
agaaagaattctcaa

SEQ ID NO: 2122747 - DNA, 15 bp, Homo sapiens
gaaagaattctcaaa

SEQ ID NO: 2122748 - DNA, 15 bp, Homo sapiens
aaagaattctcaaag

SEQ ID NO: 2122749 - DNA, 15 bp, Homo sapiens
aagaattctcaaagc

SEQ ID NO: 2122750 - DNA, 15 bp, Homo sapiens
agaattctcaaagca

SEQ ID NO: 2122751 - DNA, 15 bp, Homo sapiens
gaattctcaaagcag

SEQ ID NO: 2122752 - DNA, 15 bp, Homo sapiens
aattctcaaagcagc

SEQ ID NO: 2122753 - DNA, 15 bp, Homo sapiens
attctcaaagcagca

SEQ ID NO: 2122754 - DNA, 15 bp, Homo sapiens
ttctcaaagcagcag

SEQ ID NO: 2122755 - DNA, 15 bp, Homo sapiens
tctcaaagcagcaga

SEQ ID NO: 2122756 - DNA, 15 bp, Homo sapiens
ctcaaagcagcagaa

SEQ ID NO: 2122757 - DNA, 15 bp, Homo sapiens
tcaaagcagcagaag

SEQ ID NO: 2122758 - DNA, 15 bp, Homo sapiens
caaagcagcagaaga

SEQ ID NO: 2122759 - DNA, 15 bp, Homo sapiens
aaagcagcagaagaa

SEQ ID NO: 2122760 - DNA, 15 bp, Homo sapiens
aagcagcagaagaag

SEQ ID NO: 2122761 - DNA, 15 bp, Homo sapiens
agcagcagaagaagc

SEQ ID NO: 2122762 - DNA, 15 bp, Homo sapiens
gcagcagaagaagca

SEQ ID NO: 2122763 - DNA, 15 bp, Homo sapiens
cagcagaagaagcat

SEQ ID NO: 2122764 - DNA, 15 bp, Homo sapiens
agcagaagaagcata

SEQ ID NO: 2122765 - DNA, 15 bp, Homo sapiens
gcagaagaagcatat

SEQ ID NO: 2122766 - DNA, 15 bp, Homo sapiens
cagaagaagcatatc

SEQ ID NO: 2122767 - DNA, 15 bp, Homo sapiens
agaagaagcatatca

SEQ ID NO: 2122768 - DNA, 15 bp, Homo sapiens
gaagaagcatatcac

SEQ ID NO: 2122769 - DNA, 15 bp, Homo sapiens
aagaagcatatcaca

SEQ ID NO: 2122770 - DNA, 15 bp, Homo sapiens
agaagcatatcacat

SEQ ID NO: 2122771 - DNA, 15 bp, Homo sapiens
gaagcatatcacata

SEQ ID NO: 2122772 - DNA, 15 bp, Homo sapiens
aagcatatcacatac

SEQ ID NO: 2122773 - DNA, 15 bp, Homo sapiens
agcatatcacataca

SEQ ID NO: 2122774 - DNA, 15 bp, Homo sapiens
gcatatcacatacaa

SEQ ID NO: 2122775 - DNA, 15 bp, Homo sapiens
catatcacatacaag

SEQ ID NO: 2122776 - DNA, 15 bp, Homo sapiens
atatcacatacaagg

SEQ ID NO: 2122777 - DNA, 15 bp, Homo sapiens
tatcacatacaagga

SEQ ID NO: 2122778 - DNA, 15 bp, Homo sapiens
atcacatacaaggaa

SEQ ID NO: 2122779 - DNA, 15 bp, Homo sapiens
tcacatacaaggaag

SEQ ID NO: 2122780 - DNA, 15 bp, Homo sapiens
cacatacaaggaagc

SEQ ID NO: 2122781 - DNA, 15 bp, Homo sapiens
acatacaaggaagct

SEQ ID NO: 2122782 - DNA, 15 bp, Homo sapiens
catacaaggaagctt

SEQ ID NO: 2122783 - DNA, 15 bp, Homo sapiens
atacaaggaagcttt

SEQ ID NO: 2122784 - DNA, 15 bp, Homo sapiens
tacaaggaagcttta

SEQ ID NO: 2122785 - DNA, 15 bp, Homo sapiens
acaaggaagctttaa

SEQ ID NO: 2122786 - DNA, 15 bp, Homo sapiens
caaggaagctttaat

SEQ ID NO: 2122787 - DNA, 15 bp, Homo sapiens
aaggaagctttaata

SEQ ID NO: 2122788 - DNA, 15 bp, Homo sapiens
aggaagctttaatat

SEQ ID NO: 2122789 - DNA, 15 bp, Homo sapiens
ggaagctttaatatg

SEQ ID NO: 2122790 - DNA, 15 bp, Homo sapiens
gaagctttaatatgg

SEQ ID NO: 2122791 - DNA, 15 bp, Homo sapiens
aagctttaatatggc

SEQ ID NO: 2122792 - DNA, 15 bp, Homo sapiens
agctttaatatggct

SEQ ID NO: 2122793 - DNA, 15 bp, Homo sapiens
gctttaatatggcta

SEQ ID NO: 2122794 - DNA, 15 bp, Homo sapiens
ctttaatatggctac

SEQ ID NO: 2122795 - DNA, 15 bp, Homo sapiens
tttaatatggctacc

SEQ ID NO: 2122796 - DNA, 15 bp, Homo sapiens
ttaatatggctacca

SEQ ID NO: 2122797 - DNA, 15 bp, Homo sapiens
taatatggctaccat

SEQ ID NO: 2122798 - DNA, 15 bp, Homo sapiens
aatatggctaccatt

SEQ ID NO: 2122799 - DNA, 15 bp, Homo sapiens
atatggctaccatta

SEQ ID NO: 2122800 - DNA, 15 bp, Homo sapiens
tatggctaccattag

SEQ ID NO: 2122801 - DNA, 15 bp, Homo sapiens
atggctaccattaga

SEQ ID NO: 2122802 - DNA, 15 bp, Homo sapiens
tggctaccattagat

SEQ ID NO: 2122803 - DNA, 15 bp, Homo sapiens
ggctaccattagatt

SEQ ID NO: 2122804 - DNA, 15 bp, Homo sapiens
gctaccattagattt

SEQ ID NO: 2122805 - DNA, 15 bp, Homo sapiens
ctaccattagatttc

SEQ ID NO: 2122806 - DNA, 15 bp, Homo sapiens
taccattagatttct

SEQ ID NO: 2122807 - DNA, 15 bp, Homo sapiens
accattagatttctc

SEQ ID NO: 2122808 - DNA, 15 bp, Homo sapiens
ccattagatttctca

SEQ ID NO: 2122809 - DNA, 15 bp, Homo sapiens
cattagatttctcag

SEQ ID NO: 2122810 - DNA, 15 bp, Homo sapiens
attagatttctcagc

SEQ ID NO: 2122811 - DNA, 15 bp, Homo sapiens
ttagatttctcagca

SEQ ID NO: 2122812 - DNA, 15 bp, Homo sapiens
tagatttctcagcag

SEQ ID NO: 2122813 - DNA, 15 bp, Homo sapiens
agatttctcagcaga

SEQ ID NO: 2122814 - DNA, 15 bp, Homo sapiens
gatttctcagcagaa

SEQ ID NO: 2122815 - DNA, 15 bp, Homo sapiens
atttctcagcagaaa

SEQ ID NO: 2122816 - DNA, 15 bp, Homo sapiens
tttctcagcagaaac

SEQ ID NO: 2122817 - DNA, 15 bp, Homo sapiens
ttctcagcagaaacc

SEQ ID NO: 2122818 - DNA, 15 bp, Homo sapiens
tctcagcagaaacct

SEQ ID NO: 2122819 - DNA, 15 bp, Homo sapiens
ctcagcagaaacctt

SEQ ID NO: 2122820 - DNA, 15 bp, Homo sapiens
tcagcagaaacctta

SEQ ID NO: 2122821 - DNA, 15 bp, Homo sapiens
cagcagaaaccttac

SEQ ID NO: 2122822 - DNA, 15 bp, Homo sapiens
agcagaaaccttacg

SEQ ID NO: 2122823 - DNA, 15 bp, Homo sapiens
gcagaaaccttacgg

SEQ ID NO: 2122824 - DNA, 15 bp, Homo sapiens
cagaaaccttacggg

SEQ ID NO: 2122825 - DNA, 15 bp, Homo sapiens
agaaaccttacgggc

SEQ ID NO: 2122826 - DNA, 15 bp, Homo sapiens
gaaaccttacgggcc

SEQ ID NO: 2122827 - DNA, 15 bp, Homo sapiens
aaaccttacgggcca

SEQ ID NO: 2122828 - DNA, 15 bp, Homo sapiens
aaccttacgggccag

SEQ ID NO: 2122829 - DNA, 15 bp, Homo sapiens
accttacgggccagg

SEQ ID NO: 2122830 - DNA, 15 bp, Homo sapiens
ccttacgggccagga

SEQ ID NO: 2122831 - DNA, 15 bp, Homo sapiens
cttacgggccaggaa

SEQ ID NO: 2122832 - DNA, 15 bp, Homo sapiens
ttacgggccaggaaa

SEQ ID NO: 2122833 - DNA, 15 bp, Homo sapiens
tacgggccaggaaag

SEQ ID NO: 2122834 - DNA, 15 bp, Homo sapiens
acgggccaggaaaga

SEQ ID NO: 2122835 - DNA, 15 bp, Homo sapiens
cgggccaggaaagag

SEQ ID NO: 2122836 - DNA, 15 bp, Homo sapiens
gggccaggaaagagt

SEQ ID NO: 2122837 - DNA, 15 bp, Homo sapiens
ggccaggaaagagtg

SEQ ID NO: 2122838 - DNA, 15 bp, Homo sapiens
gccaggaaagagtgt

SEQ ID NO: 2122839 - DNA, 15 bp, Homo sapiens
ccaggaaagagtgtg

SEQ ID NO: 2122840 - DNA, 15 bp, Homo sapiens
caggaaagagtgtga

SEQ ID NO: 2122841 - DNA, 15 bp, Homo sapiens
aggaaagagtgtgag

SEQ ID NO: 2122842 - DNA, 15 bp, Homo sapiens
ggaaagagtgtgagg

SEQ ID NO: 2122843 - DNA, 15 bp, Homo sapiens
gaaagagtgtgagga

SEQ ID NO: 2122844 - DNA, 15 bp, Homo sapiens
aaagagtgtgaggat

SEQ ID NO: 2122845 - DNA, 15 bp, Homo sapiens
aagagtgtgaggata

SEQ ID NO: 2122846 - DNA, 15 bp, Homo sapiens
agagtgtgaggatat

SEQ ID NO: 2122847 - DNA, 15 bp, Homo sapiens
gagtgtgaggatata

SEQ ID NO: 2122848 - DNA, 15 bp, Homo sapiens
agtgtgaggatatat

SEQ ID NO: 2122849 - DNA, 15 bp, Homo sapiens
gtgtgaggatatatt

SEQ ID NO: 2122850 - DNA, 15 bp, Homo sapiens
tgtgaggatatattc

SEQ ID NO: 2122851 - DNA, 15 bp, Homo sapiens
gtgaggatatattct

SEQ ID NO: 2122852 - DNA, 15 bp, Homo sapiens
tgaggatatattcta

SEQ ID NO: 2122853 - DNA, 15 bp, Homo sapiens
gaggatatattctaa

SEQ ID NO: 2122854 - DNA, 15 bp, Homo sapiens
aggatatattctaag

SEQ ID NO: 2122855 - DNA, 15 bp, Homo sapiens
ggatatattctaagt

SEQ ID NO: 2122856 - DNA, 15 bp, Homo sapiens
gatatattctaagtg

SEQ ID NO: 2122857 - DNA, 15 bp, Homo sapiens
atatattctaagtgc

SEQ ID NO: 2122858 - DNA, 15 bp, Homo sapiens
tatattctaagtgct

SEQ ID NO: 2122859 - DNA, 15 bp, Homo sapiens
atattctaagtgcta

SEQ ID NO: 2122860 - DNA, 15 bp, Homo sapiens
tattctaagtgctaa

SEQ ID NO: 2122861 - DNA, 15 bp, Homo sapiens
attctaagtgctaaa

SEQ ID NO: 2122862 - DNA, 15 bp, Homo sapiens
ttctaagtgctaaag

SEQ ID NO: 2122863 - DNA, 15 bp, Homo sapiens
tctaagtgctaaagt

SEQ ID NO: 2122864 - DNA, 15 bp, Homo sapiens
ctaagtgctaaagta

SEQ ID NO: 2122865 - DNA, 15 bp, Homo sapiens
taagtgctaaagtaa

SEQ ID NO: 2122866 - DNA, 15 bp, Homo sapiens
aagtgctaaagtaaa

SEQ ID NO: 2122867 - DNA, 15 bp, Homo sapiens
agtgctaaagtaaaa

SEQ ID NO: 2122868 - DNA, 15 bp, Homo sapiens
gtgctaaagtaaaaa

SEQ ID NO: 2122869 - DNA, 15 bp, Homo sapiens
tgctaaagtaaaaaa

SEQ ID NO: 2122870 - DNA, 15 bp, Homo sapiens
gctaaagtaaaaaat

SEQ ID NO: 2122871 - DNA, 15 bp, Homo sapiens
ctaaagtaaaaaatc

SEQ ID NO: 2122872 - DNA, 15 bp, Homo sapiens
taaagtaaaaaatct

SEQ ID NO: 2122873 - DNA, 15 bp, Homo sapiens
aaagtaaaaaatctg

SEQ ID NO: 2122874 - DNA, 15 bp, Homo sapiens
aagtaaaaaatctgt

SEQ ID NO: 2122875 - DNA, 15 bp, Homo sapiens
agtaaaaaatctgtc

SEQ ID NO: 2122876 - DNA, 15 bp, Homo sapiens
gtaaaaaatctgtca

SEQ ID NO: 2122877 - DNA, 15 bp, Homo sapiens
taaaaaatctgtcaa

SEQ ID NO: 2122878 - DNA, 15 bp, Homo sapiens
aaaaaatctgtcaac

SEQ ID NO: 2122879 - DNA, 15 bp, Homo sapiens
aaaaatctgtcaact

SEQ ID NO: 2122880 - DNA, 15 bp, Homo sapiens
aaaatctgtcaacta

SEQ ID NO: 2122881 - DNA, 15 bp, Homo sapiens
aaatctgtcaactaa

SEQ ID NO: 2122882 - DNA, 15 bp, Homo sapiens
aatctgtcaactaag

SEQ ID NO: 2122883 - DNA, 15 bp, Homo sapiens
atctgtcaactaaga

SEQ ID NO: 2122884 - DNA, 15 bp, Homo sapiens
tctgtcaactaagac

SEQ ID NO: 2122885 - DNA, 15 bp, Homo sapiens
ctgtcaactaagact

SEQ ID NO: 2122886 - DNA, 15 bp, Homo sapiens
tgtcaactaagacta

SEQ ID NO: 2122887 - DNA, 15 bp, Homo sapiens
gtcaactaagactac

SEQ ID NO: 2122888 - DNA, 15 bp, Homo sapiens
tcaactaagactact

SEQ ID NO: 2122889 - DNA, 15 bp, Homo sapiens
caactaagactacta

SEQ ID NO: 2122890 - DNA, 15 bp, Homo sapiens
aactaagactactat

SEQ ID NO: 2122891 - DNA, 15 bp, Homo sapiens
actaagactactata

SEQ ID NO: 2122892 - DNA, 15 bp, Homo sapiens
ctaagactactataa

SEQ ID NO: 2122893 - DNA, 15 bp, Homo sapiens
taagactactataat

SEQ ID NO: 2122894 - DNA, 15 bp, Homo sapiens
aagactactataatc

SEQ ID NO: 2122895 - DNA, 15 bp, Homo sapiens
agactactataatca

SEQ ID NO: 2122896 - DNA, 15 bp, Homo sapiens
gactactataatcag

SEQ ID NO: 2122897 - DNA, 15 bp, Homo sapiens
actactataatcagc

SEQ ID NO: 2122898 - DNA, 15 bp, Homo sapiens
ctactataatcagca

SEQ ID NO: 2122899 - DNA, 15 bp, Homo sapiens
tactataatcagcaa

SEQ ID NO: 2122900 - DNA, 15 bp, Homo sapiens
actataatcagcaaa

SEQ ID NO: 2122901 - DNA, 15 bp, Homo sapiens
ctataatcagcaaat

SEQ ID NO: 2122902 - DNA, 15 bp, Homo sapiens
tataatcagcaaatc

SEQ ID NO: 2122903 - DNA, 15 bp, Homo sapiens
ataatcagcaaatct

SEQ ID NO: 2122904 - DNA, 15 bp, Homo sapiens
taatcagcaaatctg

SEQ ID NO: 2122905 - DNA, 15 bp, Homo sapiens
aatcagcaaatctgt

SEQ ID NO: 2122906 - DNA, 15 bp, Homo sapiens
atcagcaaatctgtc

SEQ ID NO: 2122907 - DNA, 15 bp, Homo sapiens
tcagcaaatctgtct

SEQ ID NO: 2122908 - DNA, 15 bp, Homo sapiens
cagcaaatctgtctt

SEQ ID NO: 2122909 - DNA, 15 bp, Homo sapiens
agcaaatctgtcttt

SEQ ID NO: 2122910 - DNA, 15 bp, Homo sapiens
gcaaatctgtctttc

SEQ ID NO: 2122911 - DNA, 15 bp, Homo sapiens
caaatctgtctttca

SEQ ID NO: 2122912 - DNA, 15 bp, Homo sapiens
aaatctgtctttcag

SEQ ID NO: 2122913 - DNA, 15 bp, Homo sapiens
aatctgtctttcaga

SEQ ID NO: 2122914 - DNA, 15 bp, Homo sapiens
atctgtctttcagaa

SEQ ID NO: 2122915 - DNA, 15 bp, Homo sapiens
tctgtctttcagaat

SEQ ID NO: 2122916 - DNA, 15 bp, Homo sapiens
ctgtctttcagaatt

SEQ ID NO: 2122917 - DNA, 15 bp, Homo sapiens
tgtctttcagaattg

SEQ ID NO: 2122918 - DNA, 15 bp, Homo sapiens
gtctttcagaattga

SEQ ID NO: 2122919 - DNA, 15 bp, Homo sapiens
tctttcagaattgaa

SEQ ID NO: 2122920 - DNA, 15 bp, Homo sapiens
ctttcagaattgaat

SEQ ID NO: 2122921 - DNA, 15 bp, Homo sapiens
tttcagaattgaatg

SEQ ID NO: 2122922 - DNA, 15 bp, Homo sapiens
ttcagaattgaatga

SEQ ID NO: 2122923 - DNA, 15 bp, Homo sapiens
tcagaattgaatgag

SEQ ID NO: 2122924 - DNA, 15 bp, Homo sapiens
cagaattgaatgaga

SEQ ID NO: 2122925 - DNA, 15 bp, Homo sapiens
agaattgaatgagaa

SEQ ID NO: 2122926 - DNA, 15 bp, Homo sapiens
gaattgaatgagaaa

SEQ ID NO: 2122927 - DNA, 15 bp, Homo sapiens
aattgaatgagaaat

SEQ ID NO: 2122928 - DNA, 15 bp, Homo sapiens
attgaatgagaaata

SEQ ID NO: 2122929 - DNA, 15 bp, Homo sapiens
ttgaatgagaaataa

SEQ ID NO: 2122930 - DNA, 15 bp, Homo sapiens
tgaatgagaaataaa

SEQ ID NO: 2122931 - DNA, 15 bp, Homo sapiens
gaatgagaaataaaa

SEQ ID NO: 2122932 - DNA, 15 bp, Homo sapiens
aatgagaaataaaaa

SEQ ID NO: 2122933 - DNA, 15 bp, Homo sapiens
atgagaaataaaaac

SEQ ID NO: 2122934 - DNA, 15 bp, Homo sapiens
tgagaaataaaaact

SEQ ID NO: 2122935 - DNA, 15 bp, Homo sapiens
gagaaataaaaactt

SEQ ID NO: 2122936 - DNA, 15 bp, Homo sapiens
agaaataaaaacttt

SEQ ID NO: 2122937 - DNA, 15 bp, Homo sapiens
gaaataaaaactttc

SEQ ID NO: 2122938 - DNA, 15 bp, Homo sapiens
aaataaaaactttcc

SEQ ID NO: 2122939 - DNA, 15 bp, Homo sapiens
aataaaaactttccc

SEQ ID NO: 2122940 - DNA, 15 bp, Homo sapiens
ataaaaactttccca

SEQ ID NO: 2122941 - DNA, 15 bp, Homo sapiens
taaaaactttcccag

SEQ ID NO: 2122942 - DNA, 15 bp, Homo sapiens
aaaaactttcccaga

SEQ ID NO: 2122943 - DNA, 15 bp, Homo sapiens
aaaactttcccagac

SEQ ID NO: 2122944 - DNA, 15 bp, Homo sapiens
aaactttcccagaca

SEQ ID NO: 2122945 - DNA, 15 bp, Homo sapiens
aactttcccagacat

SEQ ID NO: 2122946 - DNA, 15 bp, Homo sapiens
actttcccagacata

SEQ ID NO: 2122947 - DNA, 15 bp, Homo sapiens
ctttcccagacataa

SEQ ID NO: 2122948 - DNA, 15 bp, Homo sapiens
tttcccagacataag

SEQ ID NO: 2122949 - DNA, 15 bp, Homo sapiens
ttcccagacataagc

SEQ ID NO: 2122950 - DNA, 15 bp, Homo sapiens
tcccagacataagct

SEQ ID NO: 2122951 - DNA, 15 bp, Homo sapiens
cccagacataagctg

SEQ ID NO: 2122952 - DNA, 15 bp, Homo sapiens
ccagacataagctga

SEQ ID NO: 2122953 - DNA, 15 bp, Homo sapiens
cagacataagctgag

SEQ ID NO: 2122954 - DNA, 15 bp, Homo sapiens
agacataagctgagg

SEQ ID NO: 2122955 - DNA, 15 bp, Homo sapiens
gacataagctgaggg

SEQ ID NO: 2122956 - DNA, 15 bp, Homo sapiens
acataagctgaggga

SEQ ID NO: 2122957 - DNA, 15 bp, Homo sapiens
cataagctgagggaa

SEQ ID NO: 2122958 - DNA, 15 bp, Homo sapiens
ataagctgagggaat

SEQ ID NO: 2122959 - DNA, 15 bp, Homo sapiens
taagctgagggaatt

SEQ ID NO: 2122960 - DNA, 15 bp, Homo sapiens
aagctgagggaattc

SEQ ID NO: 2122961 - DNA, 15 bp, Homo sapiens
agctgagggaattca

SEQ ID NO: 2122962 - DNA, 15 bp, Homo sapiens
gctgagggaattcat

SEQ ID NO: 2122963 - DNA, 15 bp, Homo sapiens
ctgagggaattcatc

SEQ ID NO: 2122964 - DNA, 15 bp, Homo sapiens
tgagggaattcatca

SEQ ID NO: 2122965 - DNA, 15 bp, Homo sapiens
gagggaattcatcaa

SEQ ID NO: 2122966 - DNA, 15 bp, Homo sapiens
agggaattcatcaaa

SEQ ID NO: 2122967 - DNA, 15 bp, Homo sapiens
gggaattcatcaaac

SEQ ID NO: 2122968 - DNA, 15 bp, Homo sapiens
ggaattcatcaaaca

SEQ ID NO: 2122969 - DNA, 15 bp, Homo sapiens
gaattcatcaaacaa

SEQ ID NO: 2122970 - DNA, 15 bp, Homo sapiens
aattcatcaaacaag

SEQ ID NO: 2122971 - DNA, 15 bp, Homo sapiens
attcatcaaacaagg

SEQ ID NO: 2122972 - DNA, 15 bp, Homo sapiens
ttcatcaaacaaggc

SEQ ID NO: 2122973 - DNA, 15 bp, Homo sapiens
tcatcaaacaaggcc

SEQ ID NO: 2122974 - DNA, 15 bp, Homo sapiens
catcaaacaaggcct

SEQ ID NO: 2122975 - DNA, 15 bp, Homo sapiens
atcaaacaaggcctg

SEQ ID NO: 2122976 - DNA, 15 bp, Homo sapiens
tcaaacaaggcctgc

SEQ ID NO: 2122977 - DNA, 15 bp, Homo sapiens
caaacaaggcctgcc

SEQ ID NO: 2122978 - DNA, 15 bp, Homo sapiens
aaacaaggcctgcct

SEQ ID NO: 2122979 - DNA, 15 bp, Homo sapiens
aacaaggcctgcctt

SEQ ID NO: 2122980 - DNA, 15 bp, Homo sapiens
acaaggcctgcctta

SEQ ID NO: 2122981 - DNA, 15 bp, Homo sapiens
caaggcctgccttag

SEQ ID NO: 2122982 - DNA, 15 bp, Homo sapiens
aaggcctgccttaga

SEQ ID NO: 2122983 - DNA, 15 bp, Homo sapiens
aggcctgccttagaa

SEQ ID NO: 2122984 - DNA, 15 bp, Homo sapiens
ggcctgccttagaaa

SEQ ID NO: 2122985 - DNA, 15 bp, Homo sapiens
gcctgccttagaaat

SEQ ID NO: 2122986 - DNA, 15 bp, Homo sapiens
cctgccttagaaatg

SEQ ID NO: 2122987 - DNA, 15 bp, Homo sapiens
ctgccttagaaatgc

SEQ ID NO: 2122988 - DNA, 15 bp, Homo sapiens
tgccttagaaatgct

SEQ ID NO: 2122989 - DNA, 15 bp, Homo sapiens
gccttagaaatgcta

SEQ ID NO: 2122990 - DNA, 15 bp, Homo sapiens
ccttagaaatgctaa

SEQ ID NO: 2122991 - DNA, 15 bp, Homo sapiens
cttagaaatgctaaa

SEQ ID NO: 2122992 - DNA, 15 bp, Homo sapiens
ttagaaatgctaaac

SEQ ID NO: 2122993 - DNA, 15 bp, Homo sapiens
tagaaatgctaaaca

SEQ ID NO: 2122994 - DNA, 15 bp, Homo sapiens
agaaatgctaaacaa

SEQ ID NO: 2122995 - DNA, 15 bp, Homo sapiens
gaaatgctaaacaaa

SEQ ID NO: 2122996 - DNA, 15 bp, Homo sapiens
aaatgctaaacaaag

SEQ ID NO: 2122997 - DNA, 15 bp, Homo sapiens
aatgctaaacaaagt

SEQ ID NO: 2122998 - DNA, 15 bp, Homo sapiens
atgctaaacaaagtt

SEQ ID NO: 2122999 - DNA, 15 bp, Homo sapiens
tgctaaacaaagttt

SEQ ID NO: 2123000 - DNA, 15 bp, Homo sapiens
gctaaacaaagtttt

SEQ ID NO: 2123001 - DNA, 15 bp, Homo sapiens
ctaaacaaagttttc

SEQ ID NO: 2123002 - DNA, 15 bp, Homo sapiens
taaacaaagttttcc

SEQ ID NO: 2123003 - DNA, 15 bp, Homo sapiens
aaacaaagttttcca

SEQ ID NO: 2123004 - DNA, 15 bp, Homo sapiens
aacaaagttttccaa

SEQ ID NO: 2123005 - DNA, 15 bp, Homo sapiens
acaaagttttccaat

SEQ ID NO: 2123006 - DNA, 15 bp, Homo sapiens
caaagttttccaatc

SEQ ID NO: 2123007 - DNA, 15 bp, Homo sapiens
aaagttttccaatct

SEQ ID NO: 2123008 - DNA, 15 bp, Homo sapiens
aagttttccaatctg

SEQ ID NO: 2123009 - DNA, 15 bp, Homo sapiens
agttttccaatctga

SEQ ID NO: 2123010 - DNA, 15 bp, Homo sapiens
gttttccaatctgaa

SEQ ID NO: 2123011 - DNA, 15 bp, Homo sapiens
ttttccaatctgaaa

SEQ ID NO: 2123012 - DNA, 15 bp, Homo sapiens
tttccaatctgaaag

SEQ ID NO: 2123013 - DNA, 15 bp, Homo sapiens
ttccaatctgaaaga

SEQ ID NO: 2123014 - DNA, 15 bp, Homo sapiens
tccaatctgaaagaa

SEQ ID NO: 2123015 - DNA, 15 bp, Homo sapiens
ccaatctgaaagaac

SEQ ID NO: 2123016 - DNA, 15 bp, Homo sapiens
caatctgaaagaaca

SEQ ID NO: 2123017 - DNA, 15 bp, Homo sapiens
aatctgaaagaacaa

SEQ ID NO: 2123018 - DNA, 15 bp, Homo sapiens
atctgaaagaacaag

SEQ ID NO: 2123019 - DNA, 15 bp, Homo sapiens
tctgaaagaacaaga

SEQ ID NO: 2123020 - DNA, 15 bp, Homo sapiens
ctgaaagaacaagat

SEQ ID NO: 2123021 - DNA, 15 bp, Homo sapiens
tgaaagaacaagata

SEQ ID NO: 2123022 - DNA, 15 bp, Homo sapiens
gaaagaacaagatat

SEQ ID NO: 2123023 - DNA, 15 bp, Homo sapiens
aaagaacaagatatt

SEQ ID NO: 2123024 - DNA, 15 bp, Homo sapiens
aagaacaagatatta

SEQ ID NO: 2123025 - DNA, 15 bp, Homo sapiens
agaacaagatattaa

SEQ ID NO: 2123026 - DNA, 15 bp, Homo sapiens
gaacaagatattaat

SEQ ID NO: 2123027 - DNA, 15 bp, Homo sapiens
aacaagatattaatg

SEQ ID NO: 2123028 - DNA, 15 bp, Homo sapiens
acaagatattaatga

SEQ ID NO: 2123029 - DNA, 15 bp, Homo sapiens
caagatattaatgaa

SEQ ID NO: 2123030 - DNA, 15 bp, Homo sapiens
aagatattaatgaat

SEQ ID NO: 2123031 - DNA, 15 bp, Homo sapiens
agatattaatgaatg

SEQ ID NO: 2123032 - DNA, 15 bp, Homo sapiens
gatattaatgaatga

SEQ ID NO: 2123033 - DNA, 15 bp, Homo sapiens
atattaatgaatgaa

SEQ ID NO: 2123034 - DNA, 15 bp, Homo sapiens
tattaatgaatgaaa

SEQ ID NO: 2123035 - DNA, 15 bp, Homo sapiens
attaatgaatgaaat

SEQ ID NO: 2123036 - DNA, 15 bp, Homo sapiens
ttaatgaatgaaatg

SEQ ID NO: 2123037 - DNA, 15 bp, Homo sapiens
taatgaatgaaatga

SEQ ID NO: 2123038 - DNA, 15 bp, Homo sapiens
aatgaatgaaatgaa

SEQ ID NO: 2123039 - DNA, 15 bp, Homo sapiens
atgaatgaaatgaaa

SEQ ID NO: 2123040 - DNA, 15 bp, Homo sapiens
tgaatgaaatgaaaa

SEQ ID NO: 2123041 - DNA, 15 bp, Homo sapiens
gaatgaaatgaaaag

SEQ ID NO: 2123042 - DNA, 15 bp, Homo sapiens
aatgaaatgaaaaga

SEQ ID NO: 2123043 - DNA, 15 bp, Homo sapiens
atgaaatgaaaagat

SEQ ID NO: 2123044 - DNA, 15 bp, Homo sapiens
tgaaatgaaaagata

SEQ ID NO: 2123045 - DNA, 15 bp, Homo sapiens
gaaatgaaaagatat

SEQ ID NO: 2123046 - DNA, 15 bp, Homo sapiens
aaatgaaaagatatg

SEQ ID NO: 2123047 - DNA, 15 bp, Homo sapiens
aatgaaaagatatga

SEQ ID NO: 2123048 - DNA, 15 bp, Homo sapiens
atgaaaagatatgaa

SEQ ID NO: 2123049 - DNA, 15 bp, Homo sapiens
tgaaaagatatgaaa

SEQ ID NO: 2123050 - DNA, 15 bp, Homo sapiens
gaaaagatatgaaag

SEQ ID NO: 2123051 - DNA, 15 bp, Homo sapiens
aaaagatatgaaagt

SEQ ID NO: 2123052 - DNA, 15 bp, Homo sapiens
aaagatatgaaagta

SEQ ID NO: 2123053 - DNA, 15 bp, Homo sapiens
aagatatgaaagtat

SEQ ID NO: 2123054 - DNA, 15 bp, Homo sapiens
agatatgaaagtata

SEQ ID NO: 2123055 - DNA, 15 bp, Homo sapiens
gatatgaaagtataa

SEQ ID NO: 2123056 - DNA, 15 bp, Homo sapiens
atatgaaagtataaa

SEQ ID NO: 2123057 - DNA, 15 bp, Homo sapiens
tatgaaagtataaaa

SEQ ID NO: 2123058 - DNA, 15 bp, Homo sapiens
atgaaagtataaaac

SEQ ID NO: 2123059 - DNA, 15 bp, Homo sapiens
tgaaagtataaaact

SEQ ID NO: 2123060 - DNA, 15 bp, Homo sapiens
gaaagtataaaactt

SEQ ID NO: 2123061 - DNA, 15 bp, Homo sapiens
aaagtataaaactta

SEQ ID NO: 2123062 - DNA, 15 bp, Homo sapiens
aagtataaaacttac

SEQ ID NO: 2123063 - DNA, 15 bp, Homo sapiens
agtataaaacttacc

SEQ ID NO: 2123064 - DNA, 15 bp, Homo sapiens
gtataaaacttacca

SEQ ID NO: 2123065 - DNA, 15 bp, Homo sapiens
tataaaacttaccag

SEQ ID NO: 2123066 - DNA, 15 bp, Homo sapiens
ataaaacttaccagt

SEQ ID NO: 2123067 - DNA, 15 bp, Homo sapiens
taaaacttaccagta

SEQ ID NO: 2123068 - DNA, 15 bp, Homo sapiens
aaaacttaccagtaa

SEQ ID NO: 2123069 - DNA, 15 bp, Homo sapiens
aaacttaccagtaaa

SEQ ID NO: 2123070 - DNA, 15 bp, Homo sapiens
aacttaccagtaaaa

SEQ ID NO: 2123071 - DNA, 15 bp, Homo sapiens
acttaccagtaaaag

SEQ ID NO: 2123072 - DNA, 15 bp, Homo sapiens
cttaccagtaaaagt

SEQ ID NO: 2123073 - DNA, 15 bp, Homo sapiens
ttaccagtaaaagta

SEQ ID NO: 2123074 - DNA, 15 bp, Homo sapiens
taccagtaaaagtaa

SEQ ID NO: 2123075 - DNA, 15 bp, Homo sapiens
accagtaaaagtaaa

SEQ ID NO: 2123076 - DNA, 15 bp, Homo sapiens
ccagtaaaagtaaac

SEQ ID NO: 2123077 - DNA, 15 bp, Homo sapiens
cagtaaaagtaaaca

SEQ ID NO: 2123078 - DNA, 15 bp, Homo sapiens
agtaaaagtaaacac

SEQ ID NO: 2123079 - DNA, 15 bp, Homo sapiens
gtaaaagtaaacaca

SEQ ID NO: 2123080 - DNA, 15 bp, Homo sapiens
taaaagtaaacacat

SEQ ID NO: 2123081 - DNA, 15 bp, Homo sapiens
aaaagtaaacacatg

SEQ ID NO: 2123082 - DNA, 15 bp, Homo sapiens
aaagtaaacacatgg

SEQ ID NO: 2123083 - DNA, 15 bp, Homo sapiens
aagtaaacacatggt

SEQ ID NO: 2123084 - DNA, 15 bp, Homo sapiens
agtaaacacatggtc

SEQ ID NO: 2123085 - DNA, 15 bp, Homo sapiens
gtaaacacatggtca

SEQ ID NO: 2123086 - DNA, 15 bp, Homo sapiens
taaacacatggtcaa

SEQ ID NO: 2123087 - DNA, 15 bp, Homo sapiens
aaacacatggtcaaa

SEQ ID NO: 2123088 - DNA, 15 bp, Homo sapiens
aacacatggtcaaat

SEQ ID NO: 2123089 - DNA, 15 bp, Homo sapiens
acacatggtcaaatt

SEQ ID NO: 2123090 - DNA, 15 bp, Homo sapiens
cacatggtcaaattc

SEQ ID NO: 2123091 - DNA, 15 bp, Homo sapiens
acatggtcaaattca

SEQ ID NO: 2123092 - DNA, 15 bp, Homo sapiens
catggtcaaattcag

SEQ ID NO: 2123093 - DNA, 15 bp, Homo sapiens
atggtcaaattcaga

SEQ ID NO: 2123094 - DNA, 15 bp, Homo sapiens
tggtcaaattcagaa

SEQ ID NO: 2123095 - DNA, 15 bp, Homo sapiens
ggtcaaattcagaat

SEQ ID NO: 2123096 - DNA, 15 bp, Homo sapiens
gtcaaattcagaata

SEQ ID NO: 2123097 - DNA, 15 bp, Homo sapiens
tcaaattcagaatac

SEQ ID NO: 2123098 - DNA, 15 bp, Homo sapiens
caaattcagaatact

SEQ ID NO: 2123099 - DNA, 15 bp, Homo sapiens
aaattcagaatactc

SEQ ID NO: 2123100 - DNA, 15 bp, Homo sapiens
aattcagaatactct

SEQ ID NO: 2123101 - DNA, 15 bp, Homo sapiens
attcagaatactctt

SEQ ID NO: 2123102 - DNA, 15 bp, Homo sapiens
ttcagaatactctta

SEQ ID NO: 2123103 - DNA, 15 bp, Homo sapiens
tcagaatactcttac

SEQ ID NO: 2123104 - DNA, 15 bp, Homo sapiens
cagaatactcttaca

SEQ ID NO: 2123105 - DNA, 15 bp, Homo sapiens
agaatactcttacac

SEQ ID NO: 2123106 - DNA, 15 bp, Homo sapiens
gaatactcttacact

SEQ ID NO: 2123107 - DNA, 15 bp, Homo sapiens
aatactcttacactg

SEQ ID NO: 2123108 - DNA, 15 bp, Homo sapiens
atactcttacactgt

SEQ ID NO: 2123109 - DNA, 15 bp, Homo sapiens
tactcttacactgta

SEQ ID NO: 2123110 - DNA, 15 bp, Homo sapiens
actcttacactgtaa

SEQ ID NO: 2123111 - DNA, 15 bp, Homo sapiens
ctcttacactgtaat

SEQ ID NO: 2123112 - DNA, 15 bp, Homo sapiens
tcttacactgtaatc

SEQ ID NO: 2123113 - DNA, 15 bp, Homo sapiens
cttacactgtaatca

SEQ ID NO: 2123114 - DNA, 15 bp, Homo sapiens
ttacactgtaatcat

SEQ ID NO: 2123115 - DNA, 15 bp, Homo sapiens
tacactgtaatcatg

SEQ ID NO: 2123116 - DNA, 15 bp, Homo sapiens
acactgtaatcatgg

SEQ ID NO: 2123117 - DNA, 15 bp, Homo sapiens
cactgtaatcatggt

SEQ ID NO: 2123118 - DNA, 15 bp, Homo sapiens
actgtaatcatggtt

SEQ ID NO: 2123119 - DNA, 15 bp, Homo sapiens
ctgtaatcatggttc

SEQ ID NO: 2123120 - DNA, 15 bp, Homo sapiens
tgtaatcatggttcc

SEQ ID NO: 2123121 - DNA, 15 bp, Homo sapiens
gtaatcatggttcca

SEQ ID NO: 2123122 - DNA, 15 bp, Homo sapiens
taatcatggttccaa

SEQ ID NO: 2123123 - DNA, 15 bp, Homo sapiens
aatcatggttccaaa

SEQ ID NO: 2123124 - DNA, 15 bp, Homo sapiens
atcatggttccaaag

SEQ ID NO: 2123125 - DNA, 15 bp, Homo sapiens
tcatggttccaaagt

SEQ ID NO: 2123126 - DNA, 15 bp, Homo sapiens
catggttccaaagtt

SEQ ID NO: 2123127 - DNA, 15 bp, Homo sapiens
atggttccaaagttt

SEQ ID NO: 2123128 - DNA, 15 bp, Homo sapiens
tggttccaaagtttt

SEQ ID NO: 2123129 - DNA, 15 bp, Homo sapiens
ggttccaaagtttta

SEQ ID NO: 2123130 - DNA, 15 bp, Homo sapiens
gttccaaagttttat

SEQ ID NO: 2123131 - DNA, 15 bp, Homo sapiens
ttccaaagttttatc

SEQ ID NO: 2123132 - DNA, 15 bp, Homo sapiens
tccaaagttttatca

SEQ ID NO: 2123133 - DNA, 15 bp, Homo sapiens
ccaaagttttatcat

SEQ ID NO: 2123134 - DNA, 15 bp, Homo sapiens
caaagttttatcata

SEQ ID NO: 2123135 - DNA, 15 bp, Homo sapiens
aaagttttatcatat

SEQ ID NO: 2123136 - DNA, 15 bp, Homo sapiens
aagttttatcatatt

SEQ ID NO: 2123137 - DNA, 15 bp, Homo sapiens
agttttatcatattg

SEQ ID NO: 2123138 - DNA, 15 bp, Homo sapiens
gttttatcatattgg

SEQ ID NO: 2123139 - DNA, 15 bp, Homo sapiens
ttttatcatattggt

SEQ ID NO: 2123140 - DNA, 15 bp, Homo sapiens
tttatcatattggtg

SEQ ID NO: 2123141 - DNA, 15 bp, Homo sapiens
ttatcatattggtgt

SEQ ID NO: 2123142 - DNA, 15 bp, Homo sapiens
tatcatattggtgtg

SEQ ID NO: 2123143 - DNA, 15 bp, Homo sapiens
atcatattggtgtgg

SEQ ID NO: 2123144 - DNA, 15 bp, Homo sapiens
tcatattggtgtggg

SEQ ID NO: 2123145 - DNA, 15 bp, Homo sapiens
catattggtgtgggc

SEQ ID NO: 2123146 - DNA, 15 bp, Homo sapiens
atattggtgtgggca

SEQ ID NO: 2123147 - DNA, 15 bp, Homo sapiens
tattggtgtgggcaa

SEQ ID NO: 2123148 - DNA, 15 bp, Homo sapiens
attggtgtgggcaat

SEQ ID NO: 2123149 - DNA, 15 bp, Homo sapiens
ttggtgtgggcaata

SEQ ID NO: 2123150 - DNA, 15 bp, Homo sapiens
tggtgtgggcaataa

SEQ ID NO: 2123151 - DNA, 15 bp, Homo sapiens
ggtgtgggcaataat

SEQ ID NO: 2123152 - DNA, 15 bp, Homo sapiens
gtgtgggcaataatg

SEQ ID NO: 2123153 - DNA, 15 bp, Homo sapiens
tgtgggcaataatgt

SEQ ID NO: 2123154 - DNA, 15 bp, Homo sapiens
gtgggcaataatgtt

SEQ ID NO: 2123155 - DNA, 15 bp, Homo sapiens
tgggcaataatgttt

SEQ ID NO: 2123156 - DNA, 15 bp, Homo sapiens
gggcaataatgtttt

SEQ ID NO: 2123157 - DNA, 15 bp, Homo sapiens
ggcaataatgtttta

SEQ ID NO: 2123158 - DNA, 15 bp, Homo sapiens
gcaataatgttttag

SEQ ID NO: 2123159 - DNA, 15 bp, Homo sapiens
caataatgttttaga

SEQ ID NO: 2123160 - DNA, 15 bp, Homo sapiens
aataatgttttagat

SEQ ID NO: 2123161 - DNA, 15 bp, Homo sapiens
ataatgttttagata

SEQ ID NO: 2123162 - DNA, 15 bp, Homo sapiens
taatgttttagatat

SEQ ID NO: 2123163 - DNA, 15 bp, Homo sapiens
aatgttttagatatg

SEQ ID NO: 2123164 - DNA, 15 bp, Homo sapiens
atgttttagatatga

SEQ ID NO: 2123165 - DNA, 15 bp, Homo sapiens
tgttttagatatgaa

SEQ ID NO: 2123166 - DNA, 15 bp, Homo sapiens
gttttagatatgaac

SEQ ID NO: 2123167 - DNA, 15 bp, Homo sapiens
ttttagatatgaaca

SEQ ID NO: 2123168 - DNA, 15 bp, Homo sapiens
tttagatatgaacac

SEQ ID NO: 2123169 - DNA, 15 bp, Homo sapiens
ttagatatgaacaca

SEQ ID NO: 2123170 - DNA, 15 bp, Homo sapiens
tagatatgaacacaa

SEQ ID NO: 2123171 - DNA, 15 bp, Homo sapiens
agatatgaacacaaa

SEQ ID NO: 2123172 - DNA, 15 bp, Homo sapiens
gatatgaacacaaaa

SEQ ID NO: 2123173 - DNA, 15 bp, Homo sapiens
atatgaacacaaaag

SEQ ID NO: 2123174 - DNA, 15 bp, Homo sapiens
tatgaacacaaaagc

SEQ ID NO: 2123175 - DNA, 15 bp, Homo sapiens
atgaacacaaaagca

SEQ ID NO: 2123176 - DNA, 15 bp, Homo sapiens
tgaacacaaaagcag

SEQ ID NO: 2123177 - DNA, 15 bp, Homo sapiens
gaacacaaaagcaga

SEQ ID NO: 2123178 - DNA, 15 bp, Homo sapiens
aacacaaaagcagag

SEQ ID NO: 2123179 - DNA, 15 bp, Homo sapiens
acacaaaagcagagg

SEQ ID NO: 2123180 - DNA, 15 bp, Homo sapiens
cacaaaagcagagga

SEQ ID NO: 2123181 - DNA, 15 bp, Homo sapiens
acaaaagcagaggaa

SEQ ID NO: 2123182 - DNA, 15 bp, Homo sapiens
caaaagcagaggaaa

SEQ ID NO: 2123183 - DNA, 15 bp, Homo sapiens
aaaagcagaggaaat

SEQ ID NO: 2123184 - DNA, 15 bp, Homo sapiens
aaagcagaggaaata

SEQ ID NO: 2123185 - DNA, 15 bp, Homo sapiens
aagcagaggaaataa

SEQ ID NO: 2123186 - DNA, 15 bp, Homo sapiens
agcagaggaaataaa

SEQ ID NO: 2123187 - DNA, 15 bp, Homo sapiens
gcagaggaaataaaa

SEQ ID NO: 2123188 - DNA, 15 bp, Homo sapiens
cagaggaaataaaag

SEQ ID NO: 2123189 - DNA, 15 bp, Homo sapiens
agaggaaataaaagt

SEQ ID NO: 2123190 - DNA, 15 bp, Homo sapiens
gaggaaataaaagtg

SEQ ID NO: 2123191 - DNA, 15 bp, Homo sapiens
aggaaataaaagtga

SEQ ID NO: 2123192 - DNA, 15 bp, Homo sapiens
ggaaataaaagtgaa

SEQ ID NO: 2123193 - DNA, 15 bp, Homo sapiens
gaaataaaagtgaaa

SEQ ID NO: 2123194 - DNA, 15 bp, Homo sapiens
aaataaaagtgaaaa

SEQ ID NO: 2123195 - DNA, 15 bp, Homo sapiens
aataaaagtgaaaat

SEQ ID NO: 2123196 - DNA, 15 bp, Homo sapiens
ataaaagtgaaaata

SEQ ID NO: 2123197 - DNA, 15 bp, Homo sapiens
taaaagtgaaaatag

SEQ ID NO: 2123198 - DNA, 15 bp, Homo sapiens
aaaagtgaaaataga

SEQ ID NO: 2123199 - DNA, 15 bp, Homo sapiens
aaagtgaaaatagac

SEQ ID NO: 2123200 - DNA, 15 bp, Homo sapiens
aagtgaaaatagaca

SEQ ID NO: 2123201 - DNA, 15 bp, Homo sapiens
agtgaaaatagacaa

SEQ ID NO: 2123202 - DNA, 15 bp, Homo sapiens
gtgaaaatagacaaa

SEQ ID NO: 2123203 - DNA, 15 bp, Homo sapiens
tgaaaatagacaaat

SEQ ID NO: 2123204 - DNA, 15 bp, Homo sapiens
gaaaatagacaaatg

SEQ ID NO: 2123205 - DNA, 15 bp, Homo sapiens
atagacaaatgggat

SEQ ID NO: 2123206 - DNA, 15 bp, Homo sapiens
tagacaaatgggatt

SEQ ID NO: 2123207 - DNA, 15 bp, Homo sapiens
agacaaatgggatta

SEQ ID NO: 2123208 - DNA, 15 bp, Homo sapiens
gacaaatgggattac

SEQ ID NO: 2123209 - DNA, 15 bp, Homo sapiens
acaaatgggattaca

SEQ ID NO: 2123210 - DNA, 15 bp, Homo sapiens
caaatgggattacat

SEQ ID NO: 2123211 - DNA, 15 bp, Homo sapiens
aaatgggattacatg

SEQ ID NO: 2123212 - DNA, 15 bp, Homo sapiens
aatgggattacatgt

SEQ ID NO: 2123213 - DNA, 15 bp, Homo sapiens
atgggattacatgta

SEQ ID NO: 2123214 - DNA, 15 bp, Homo sapiens
tgggattacatgtaa

SEQ ID NO: 2123215 - DNA, 15 bp, Homo sapiens
gggattacatgtaac

SEQ ID NO: 2123216 - DNA, 15 bp, Homo sapiens
ggattacatgtaact

SEQ ID NO: 2123217 - DNA, 15 bp, Homo sapiens
gattacatgtaacta

SEQ ID NO: 2123218 - DNA, 15 bp, Homo sapiens
attacatgtaactaa

SEQ ID NO: 2123219 - DNA, 15 bp, Homo sapiens
ttacatgtaactaaa

SEQ ID NO: 2123220 - DNA, 15 bp, Homo sapiens
tacatgtaactaaaa

SEQ ID NO: 2123221 - DNA, 15 bp, Homo sapiens
acatgtaactaaaaa

SEQ ID NO: 2123222 - DNA, 15 bp, Homo sapiens
catgtaactaaaaag

SEQ ID NO: 2123223 - DNA, 15 bp, Homo sapiens
atgtaactaaaaagc

SEQ ID NO: 2123224 - DNA, 15 bp, Homo sapiens
tgtaactaaaaagct

SEQ ID NO: 2123225 - DNA, 15 bp, Homo sapiens
gtaactaaaaagctt

SEQ ID NO: 2123226 - DNA, 15 bp, Homo sapiens
taactaaaaagcttc

SEQ ID NO: 2123227 - DNA, 15 bp, Homo sapiens
aactaaaaagcttct

SEQ ID NO: 2123228 - DNA, 15 bp, Homo sapiens
actaaaaagcttctg

SEQ ID NO: 2123229 - DNA, 15 bp, Homo sapiens
ctaaaaagcttctgc

SEQ ID NO: 2123230 - DNA, 15 bp, Homo sapiens
aaaaagcttctgcat

SEQ ID NO: 2123231 - DNA, 15 bp, Homo sapiens
aaaagcttctgcata

SEQ ID NO: 2123232 - DNA, 15 bp, Homo sapiens
aaagcttctgcatag

SEQ ID NO: 2123233 - DNA, 15 bp, Homo sapiens
aagcttctgcatagg

SEQ ID NO: 2123234 - DNA, 15 bp, Homo sapiens
agcttctgcataggc

SEQ ID NO: 2123235 - DNA, 15 bp, Homo sapiens
gcttctgcataggca

SEQ ID NO: 2123236 - DNA, 15 bp, Homo sapiens
cttctgcataggcaa

SEQ ID NO: 2123237 - DNA, 15 bp, Homo sapiens
ttctgcataggcaag

SEQ ID NO: 2123238 - DNA, 15 bp, Homo sapiens
tctgcataggcaagg

SEQ ID NO: 2123239 - DNA, 15 bp, Homo sapiens
ctgcataggcaagga

SEQ ID NO: 2123240 - DNA, 15 bp, Homo sapiens
tgcataggcaaggaa

SEQ ID NO: 2123241 - DNA, 15 bp, Homo sapiens
gcataggcaaggaaa

SEQ ID NO: 2123242 - DNA, 15 bp, Homo sapiens
cataggcaaggaaac

SEQ ID NO: 2123243 - DNA, 15 bp, Homo sapiens
ataggcaaggaaaca

SEQ ID NO: 2123244 - DNA, 15 bp, Homo sapiens
taggcaaggaaacaa

SEQ ID NO: 2123245 - DNA, 15 bp, Homo sapiens
aggcaaggaaacaat

SEQ ID NO: 2123246 - DNA, 15 bp, Homo sapiens
ggcaaggaaacaatg

SEQ ID NO: 2123247 - DNA, 15 bp, Homo sapiens
gcaaggaaacaatga

SEQ ID NO: 2123248 - DNA, 15 bp, Homo sapiens
caaggaaacaatgaa

SEQ ID NO: 2123249 - DNA, 15 bp, Homo sapiens
aaggaaacaatgaac

SEQ ID NO: 2123250 - DNA, 15 bp, Homo sapiens
aggaaacaatgaaca

SEQ ID NO: 2123251 - DNA, 15 bp, Homo sapiens
ggaaacaatgaacag

SEQ ID NO: 2123252 - DNA, 15 bp, Homo sapiens
gaaacaatgaacaga

SEQ ID NO: 2123253 - DNA, 15 bp, Homo sapiens
aaacaatgaacagag

SEQ ID NO: 2123254 - DNA, 15 bp, Homo sapiens
aacaatgaacagagt

SEQ ID NO: 2123255 - DNA, 15 bp, Homo sapiens
acaatgaacagagtg

SEQ ID NO: 2123256 - DNA, 15 bp, Homo sapiens
caatgaacagagtgg

SEQ ID NO: 2123257 - DNA, 15 bp, Homo sapiens
aatgaacagagtggg

SEQ ID NO: 2123258 - DNA, 15 bp, Homo sapiens
atgaacagagtggga

SEQ ID NO: 2123259 - DNA, 15 bp, Homo sapiens
tgaacagagtgggag

SEQ ID NO: 2123260 - DNA, 15 bp, Homo sapiens
gaacagagtgggaga

SEQ ID NO: 2123261 - DNA, 15 bp, Homo sapiens
aacagagtgggagac

SEQ ID NO: 2123262 - DNA, 15 bp, Homo sapiens
acagagtgggagaca

SEQ ID NO: 2123263 - DNA, 15 bp, Homo sapiens
cagagtgggagacaa

SEQ ID NO: 2123264 - DNA, 15 bp, Homo sapiens
agagtgggagacaac

SEQ ID NO: 2123265 - DNA, 15 bp, Homo sapiens
gagtgggagacaacc

SEQ ID NO: 2123266 - DNA, 15 bp, Homo sapiens
agtgggagacaacct

SEQ ID NO: 2123267 - DNA, 15 bp, Homo sapiens
gtgggagacaacctt

SEQ ID NO: 2123268 - DNA, 15 bp, Homo sapiens
gggagacaacctttg

SEQ ID NO: 2123269 - DNA, 15 bp, Homo sapiens
ggagacaacctttgg

SEQ ID NO: 2123270 - DNA, 15 bp, Homo sapiens
gagacaacctttgga

SEQ ID NO: 2123271 - DNA, 15 bp, Homo sapiens
agacaacctttggaa

SEQ ID NO: 2123272 - DNA, 15 bp, Homo sapiens
gacaacctttggaat

SEQ ID NO: 2123273 - DNA, 15 bp, Homo sapiens
acaacctttggaata

SEQ ID NO: 2123274 - DNA, 15 bp, Homo sapiens
caacctttggaatag

SEQ ID NO: 2123275 - DNA, 15 bp, Homo sapiens
aacctttggaatagg

SEQ ID NO: 2123276 - DNA, 15 bp, Homo sapiens
acctttggaatagga

SEQ ID NO: 2123277 - DNA, 15 bp, Homo sapiens
cctttggaataggag

SEQ ID NO: 2123278 - DNA, 15 bp, Homo sapiens
ctttggaataggaga

SEQ ID NO: 2123279 - DNA, 15 bp, Homo sapiens
tttggaataggagaa

SEQ ID NO: 2123280 - DNA, 15 bp, Homo sapiens
ttggaataggagaat

SEQ ID NO: 2123281 - DNA, 15 bp, Homo sapiens
tggaataggagaata

SEQ ID NO: 2123282 - DNA, 15 bp, Homo sapiens
ggaataggagaatat

SEQ ID NO: 2123283 - DNA, 15 bp, Homo sapiens
gaataggagaatata

SEQ ID NO: 2123284 - DNA, 15 bp, Homo sapiens
aataggagaatatat

SEQ ID NO: 2123285 - DNA, 15 bp, Homo sapiens
ataggagaatatatt

SEQ ID NO: 2123286 - DNA, 15 bp, Homo sapiens
taggagaatatattt

SEQ ID NO: 2123287 - DNA, 15 bp, Homo sapiens
aggagaatatatttg

SEQ ID NO: 2123288 - DNA, 15 bp, Homo sapiens
ggagaatatatttgt

SEQ ID NO: 2123289 - DNA, 15 bp, Homo sapiens
gagaatatatttgta

SEQ ID NO: 2123290 - DNA, 15 bp, Homo sapiens
agaatatatttgtaa

SEQ ID NO: 2123291 - DNA, 15 bp, Homo sapiens
gaatatatttgtaaa

SEQ ID NO: 2123292 - DNA, 15 bp, Homo sapiens
aatatatttgtaaac

SEQ ID NO: 2123293 - DNA, 15 bp, Homo sapiens
atatatttgtaaacc

SEQ ID NO: 2123294 - DNA, 15 bp, Homo sapiens
tatatttgtaaacca

SEQ ID NO: 2123295 - DNA, 15 bp, Homo sapiens
atatttgtaaaccat

SEQ ID NO: 2123296 - DNA, 15 bp, Homo sapiens
tatttgtaaaccata

SEQ ID NO: 2123297 - DNA, 15 bp, Homo sapiens
atttgtaaaccatac

SEQ ID NO: 2123298 - DNA, 15 bp, Homo sapiens
tttgtaaaccataca

SEQ ID NO: 2123299 - DNA, 15 bp, Homo sapiens
ttgtaaaccatacat

SEQ ID NO: 2123300 - DNA, 15 bp, Homo sapiens
tgtaaaccatacatc

SEQ ID NO: 2123301 - DNA, 15 bp, Homo sapiens
gtaaaccatacatcc

SEQ ID NO: 2123302 - DNA, 15 bp, Homo sapiens
taaaccatacatcca

SEQ ID NO: 2123303 - DNA, 15 bp, Homo sapiens
aaaccatacatccag

SEQ ID NO: 2123304 - DNA, 15 bp, Homo sapiens
aaccatacatccagt

SEQ ID NO: 2123305 - DNA, 15 bp, Homo sapiens
accatacatccagta

SEQ ID NO: 2123306 - DNA, 15 bp, Homo sapiens
ccatacatccagtaa

SEQ ID NO: 2123307 - DNA, 15 bp, Homo sapiens
catacatccagtaag

SEQ ID NO: 2123308 - DNA, 15 bp, Homo sapiens
atacatccagtaagg

SEQ ID NO: 2123309 - DNA, 15 bp, Homo sapiens
tacatccagtaaggg

SEQ ID NO: 2123310 - DNA, 15 bp, Homo sapiens
acatccagtaagggg

SEQ ID NO: 2123311 - DNA, 15 bp, Homo sapiens
catccagtaaggggt

SEQ ID NO: 2123312 - DNA, 15 bp, Homo sapiens
atccagtaaggggtt

SEQ ID NO: 2123313 - DNA, 15 bp, Homo sapiens
tccagtaaggggtta

SEQ ID NO: 2123314 - DNA, 15 bp, Homo sapiens
ccagtaaggggttaa

SEQ ID NO: 2123315 - DNA, 15 bp, Homo sapiens
cagtaaggggttaat

SEQ ID NO: 2123316 - DNA, 15 bp, Homo sapiens
agtaaggggttaata

SEQ ID NO: 2123317 - DNA, 15 bp, Homo sapiens
gtaaggggttaatat

SEQ ID NO: 2123318 - DNA, 15 bp, Homo sapiens
taaggggttaatatc

SEQ ID NO: 2123319 - DNA, 15 bp, Homo sapiens
aaggggttaatatcc

SEQ ID NO: 2123320 - DNA, 15 bp, Homo sapiens
aggggttaatatcca

SEQ ID NO: 2123321 - DNA, 15 bp, Homo sapiens
ggggttaatatccag

SEQ ID NO: 2123322 - DNA, 15 bp, Homo sapiens
gggttaatatccagt

SEQ ID NO: 2123323 - DNA, 15 bp, Homo sapiens
ggttaatatccagta

SEQ ID NO: 2123324 - DNA, 15 bp, Homo sapiens
gttaatatccagtat

SEQ ID NO: 2123325 - DNA, 15 bp, Homo sapiens
ttaatatccagtata

SEQ ID NO: 2123326 - DNA, 15 bp, Homo sapiens
taatatccagtatac

SEQ ID NO: 2123327 - DNA, 15 bp, Homo sapiens
aatatccagtataca

SEQ ID NO: 2123328 - DNA, 15 bp, Homo sapiens
atatccagtatacag

SEQ ID NO: 2123329 - DNA, 15 bp, Homo sapiens
tatccagtatacaga

SEQ ID NO: 2123330 - DNA, 15 bp, Homo sapiens
atccagtatacagaa

SEQ ID NO: 2123331 - DNA, 15 bp, Homo sapiens
tccagtatacagaaa

SEQ ID NO: 2123332 - DNA, 15 bp, Homo sapiens
ccagtatacagaaag

SEQ ID NO: 2123333 - DNA, 15 bp, Homo sapiens
cagtatacagaaaga

SEQ ID NO: 2123334 - DNA, 15 bp, Homo sapiens
agtatacagaaagaa

SEQ ID NO: 2123335 - DNA, 15 bp, Homo sapiens
gtatacagaaagaac

SEQ ID NO: 2123336 - DNA, 15 bp, Homo sapiens
tatacagaaagaact

SEQ ID NO: 2123337 - DNA, 15 bp, Homo sapiens
atacagaaagaactc

SEQ ID NO: 2123338 - DNA, 15 bp, Homo sapiens
tacagaaagaactca

SEQ ID NO: 2123339 - DNA, 15 bp, Homo sapiens
acagaaagaactcaa

SEQ ID NO: 2123340 - DNA, 15 bp, Homo sapiens
cagaaagaactcaaa

SEQ ID NO: 2123341 - DNA, 15 bp, Homo sapiens
agaaagaactcaaag

SEQ ID NO: 2123342 - DNA, 15 bp, Homo sapiens
gaaagaactcaaaga

SEQ ID NO: 2123343 - DNA, 15 bp, Homo sapiens
aaagaactcaaagaa

SEQ ID NO: 2123344 - DNA, 15 bp, Homo sapiens
aagaactcaaagaac

SEQ ID NO: 2123345 - DNA, 15 bp, Homo sapiens
agaactcaaagaact

SEQ ID NO: 2123346 - DNA, 15 bp, Homo sapiens
gaactcaaagaactc

SEQ ID NO: 2123347 - DNA, 15 bp, Homo sapiens
aactcaaagaactca

SEQ ID NO: 2123348 - DNA, 15 bp, Homo sapiens
actcaaagaactcaa

SEQ ID NO: 2123349 - DNA, 15 bp, Homo sapiens
ctcaaagaactcaat

SEQ ID NO: 2123350 - DNA, 15 bp, Homo sapiens
tcaaagaactcaata

SEQ ID NO: 2123351 - DNA, 15 bp, Homo sapiens
caaagaactcaatat

SEQ ID NO: 2123352 - DNA, 15 bp, Homo sapiens
aaagaactcaatatc

SEQ ID NO: 2123353 - DNA, 15 bp, Homo sapiens
aagaactcaatatca

SEQ ID NO: 2123354 - DNA, 15 bp, Homo sapiens
agaactcaatatcaa

SEQ ID NO: 2123355 - DNA, 15 bp, Homo sapiens
gaactcaatatcaag

SEQ ID NO: 2123356 - DNA, 15 bp, Homo sapiens
aactcaatatcaaga

SEQ ID NO: 2123357 - DNA, 15 bp, Homo sapiens
actcaatatcaagaa

SEQ ID NO: 2123358 - DNA, 15 bp, Homo sapiens
ctcaatatcaagaaa

SEQ ID NO: 2123359 - DNA, 15 bp, Homo sapiens
tcaatatcaagaaaa

SEQ ID NO: 2123360 - DNA, 15 bp, Homo sapiens
caatatcaagaaaac

SEQ ID NO: 2123361 - DNA, 15 bp, Homo sapiens
aatatcaagaaaaca

SEQ ID NO: 2123362 - DNA, 15 bp, Homo sapiens
atatcaagaaaacaa

SEQ ID NO: 2123363 - DNA, 15 bp, Homo sapiens
tatcaagaaaacaaa

SEQ ID NO: 2123364 - DNA, 15 bp, Homo sapiens
atcaagaaaacaaat

SEQ ID NO: 2123365 - DNA, 15 bp, Homo sapiens
tcaagaaaacaaata

SEQ ID NO: 2123366 - DNA, 15 bp, Homo sapiens
caagaaaacaaatag

SEQ ID NO: 2123367 - DNA, 15 bp, Homo sapiens
aagaaaacaaatagc

SEQ ID NO: 2123368 - DNA, 15 bp, Homo sapiens
agaaaacaaatagct

SEQ ID NO: 2123369 - DNA, 15 bp, Homo sapiens
gaaaacaaatagctc

SEQ ID NO: 2123370 - DNA, 15 bp, Homo sapiens
aaaacaaatagctca

SEQ ID NO: 2123371 - DNA, 15 bp, Homo sapiens
aaacaaatagctcaa

SEQ ID NO: 2123372 - DNA, 15 bp, Homo sapiens
aacaaatagctcaat

SEQ ID NO: 2123373 - DNA, 15 bp, Homo sapiens
acaaatagctcaatt

SEQ ID NO: 2123374 - DNA, 15 bp, Homo sapiens
caaatagctcaatta

SEQ ID NO: 2123375 - DNA, 15 bp, Homo sapiens
aaatagctcaattaa

SEQ ID NO: 2123376 - DNA, 15 bp, Homo sapiens
aatagctcaattaaa

SEQ ID NO: 2123377 - DNA, 15 bp, Homo sapiens
atagctcaattaaaa

SEQ ID NO: 2123378 - DNA, 15 bp, Homo sapiens
tagctcaattaaaaa

SEQ ID NO: 2123379 - DNA, 15 bp, Homo sapiens
agctcaattaaaaaa

SEQ ID NO: 2123380 - DNA, 15 bp, Homo sapiens
gctcaattaaaaaat

SEQ ID NO: 2123381 - DNA, 15 bp, Homo sapiens
ctcaattaaaaaatg

SEQ ID NO: 2123382 - DNA, 15 bp, Homo sapiens
tcaattaaaaaatgg

SEQ ID NO: 2123383 - DNA, 15 bp, Homo sapiens
caattaaaaaatggg

SEQ ID NO: 2123384 - DNA, 15 bp, Homo sapiens
aattaaaaaatgggc

SEQ ID NO: 2123385 - DNA, 15 bp, Homo sapiens
attaaaaaatgggca

SEQ ID NO: 2123386 - DNA, 15 bp, Homo sapiens
ttaaaaaatgggcac

SEQ ID NO: 2123387 - DNA, 15 bp, Homo sapiens
taaaaaatgggcaca

SEQ ID NO: 2123388 - DNA, 15 bp, Homo sapiens
aaaaaatgggcacag

SEQ ID NO: 2123389 - DNA, 15 bp, Homo sapiens
aaaaatgggcacagg

SEQ ID NO: 2123390 - DNA, 15 bp, Homo sapiens
aaaatgggcacagga

SEQ ID NO: 2123391 - DNA, 15 bp, Homo sapiens
aaatgggcacaggac

SEQ ID NO: 2123392 - DNA, 15 bp, Homo sapiens
aatgggcacaggacc

SEQ ID NO: 2123393 - DNA, 15 bp, Homo sapiens
atgggcacaggacct

SEQ ID NO: 2123394 - DNA, 15 bp, Homo sapiens
tgggcacaggacctg

SEQ ID NO: 2123395 - DNA, 15 bp, Homo sapiens
gggcacaggacctgg

SEQ ID NO: 2123396 - DNA, 15 bp, Homo sapiens
ggcacaggacctgga

SEQ ID NO: 2123397 - DNA, 15 bp, Homo sapiens
gcacaggacctggat

SEQ ID NO: 2123398 - DNA, 15 bp, Homo sapiens
cacaggacctggata

SEQ ID NO: 2123399 - DNA, 15 bp, Homo sapiens
acaggacctggatag

SEQ ID NO: 2123400 - DNA, 15 bp, Homo sapiens
caggacctggataga

SEQ ID NO: 2123401 - DNA, 15 bp, Homo sapiens
aggacctggatagac

SEQ ID NO: 2123402 - DNA, 15 bp, Homo sapiens
ggacctggatagaca

SEQ ID NO: 2123403 - DNA, 15 bp, Homo sapiens
gacctggatagacat

SEQ ID NO: 2123404 - DNA, 15 bp, Homo sapiens
acctggatagacatt

SEQ ID NO: 2123405 - DNA, 15 bp, Homo sapiens
cctggatagacattt

SEQ ID NO: 2123406 - DNA, 15 bp, Homo sapiens
ctggatagacatttt

SEQ ID NO: 2123407 - DNA, 15 bp, Homo sapiens
tggatagacattttt

SEQ ID NO: 2123408 - DNA, 15 bp, Homo sapiens
ggatagacatttttc

SEQ ID NO: 2123409 - DNA, 15 bp, Homo sapiens
gatagacatttttca

SEQ ID NO: 2123410 - DNA, 15 bp, Homo sapiens
atagacatttttcaa

SEQ ID NO: 2123411 - DNA, 15 bp, Homo sapiens
tagacatttttcaaa

SEQ ID NO: 2123412 - DNA, 15 bp, Homo sapiens
agacatttttcaaaa

SEQ ID NO: 2123413 - DNA, 15 bp, Homo sapiens
gacatttttcaaaat

SEQ ID NO: 2123414 - DNA, 15 bp, Homo sapiens
acatttttcaaaata

SEQ ID NO: 2123415 - DNA, 15 bp, Homo sapiens
catttttcaaaataa

SEQ ID NO: 2123416 - DNA, 15 bp, Homo sapiens
atttttcaaaataag

SEQ ID NO: 2123417 - DNA, 15 bp, Homo sapiens
tttttcaaaataaga

SEQ ID NO: 2123418 - DNA, 15 bp, Homo sapiens
ttttcaaaataagac

SEQ ID NO: 2123419 - DNA, 15 bp, Homo sapiens
tttcaaaataagact

SEQ ID NO: 2123420 - DNA, 15 bp, Homo sapiens
ttcaaaataagactt

SEQ ID NO: 2123421 - DNA, 15 bp, Homo sapiens
tcaaaataagactta

SEQ ID NO: 2123422 - DNA, 15 bp, Homo sapiens
caaaataagacttag

SEQ ID NO: 2123423 - DNA, 15 bp, Homo sapiens
aaaataagacttaga

SEQ ID NO: 2123424 - DNA, 15 bp, Homo sapiens
aaataagacttagaa

SEQ ID NO: 2123425 - DNA, 15 bp, Homo sapiens
aataagacttagaaa

SEQ ID NO: 2123426 - DNA, 15 bp, Homo sapiens
ataagacttagaaat

SEQ ID NO: 2123427 - DNA, 15 bp, Homo sapiens
taagacttagaaatg

SEQ ID NO: 2123428 - DNA, 15 bp, Homo sapiens
aagacttagaaatgg

SEQ ID NO: 2123429 - DNA, 15 bp, Homo sapiens
agacttagaaatggc

SEQ ID NO: 2123430 - DNA, 15 bp, Homo sapiens
gacttagaaatggcc

SEQ ID NO: 2123431 - DNA, 15 bp, Homo sapiens
acttagaaatggcca

SEQ ID NO: 2123432 - DNA, 15 bp, Homo sapiens
cttagaaatggccaa

SEQ ID NO: 2123433 - DNA, 15 bp, Homo sapiens
ttagaaatggccaac

SEQ ID NO: 2123434 - DNA, 15 bp, Homo sapiens
tagaaatggccaaca

SEQ ID NO: 2123435 - DNA, 15 bp, Homo sapiens
agaaatggccaacag

SEQ ID NO: 2123436 - DNA, 15 bp, Homo sapiens
gaaatggccaacagg

SEQ ID NO: 2123437 - DNA, 15 bp, Homo sapiens
aaatggccaacaggc

SEQ ID NO: 2123438 - DNA, 15 bp, Homo sapiens
aatggccaacaggct

SEQ ID NO: 2123439 - DNA, 15 bp, Homo sapiens
atggccaacaggctg

SEQ ID NO: 2123440 - DNA, 15 bp, Homo sapiens
tggccaacaggctgg

SEQ ID NO: 2123441 - DNA, 15 bp, Homo sapiens
ggccaacaggctggg

SEQ ID NO: 2123442 - DNA, 15 bp, Homo sapiens
gccaacaggctgggt

SEQ ID NO: 2123443 - DNA, 15 bp, Homo sapiens
ccaacaggctgggtg

SEQ ID NO: 2123444 - DNA, 15 bp, Homo sapiens
caacaggctgggtgc

SEQ ID NO: 2123445 - DNA, 15 bp, Homo sapiens
aacaggctgggtgcg

SEQ ID NO: 2123446 - DNA, 15 bp, Homo sapiens
tgcggtggctcacat

SEQ ID NO: 2123447 - DNA, 15 bp, Homo sapiens
gcggtggctcacatc

SEQ ID NO: 2123448 - DNA, 15 bp, Homo sapiens
cggtggctcacatct

SEQ ID NO: 2123449 - DNA, 15 bp, Homo sapiens
ggtggctcacatctg

SEQ ID NO: 2123450 - DNA, 15 bp, Homo sapiens
gctcacatctgtaat

SEQ ID NO: 2123451 - DNA, 15 bp, Homo sapiens
ctcacatctgtaatc

SEQ ID NO: 2123452 - DNA, 15 bp, Homo sapiens
tcacatctgtaatcc

SEQ ID NO: 2123453 - DNA, 15 bp, Homo sapiens
cacatctgtaatccc

SEQ ID NO: 2123454 - DNA, 15 bp, Homo sapiens
acatctgtaatccca

SEQ ID NO: 2123455 - DNA, 15 bp, Homo sapiens
catctgtaatcccag

SEQ ID NO: 2123456 - DNA, 15 bp, Homo sapiens
atctgtaatcccagc

SEQ ID NO: 2123457 - DNA, 15 bp, Homo sapiens
tctgtaatcccagca

SEQ ID NO: 2123458 - DNA, 15 bp, Homo sapiens
aggccaaggtgggca

SEQ ID NO: 2123459 - DNA, 15 bp, Homo sapiens
ggccaaggtgggcag

SEQ ID NO: 2123460 - DNA, 15 bp, Homo sapiens
aaggtgggcagatcc

SEQ ID NO: 2123461 - DNA, 15 bp, Homo sapiens
aggtgggcagatccc

SEQ ID NO: 2123462 - DNA, 15 bp, Homo sapiens
ggtgggcagatccct

SEQ ID NO: 2123463 - DNA, 15 bp, Homo sapiens
gtgggcagatccctt

SEQ ID NO: 2123464 - DNA, 15 bp, Homo sapiens
tgggcagatcccttg

SEQ ID NO: 2123465 - DNA, 15 bp, Homo sapiens
gggcagatcccttga

SEQ ID NO: 2123466 - DNA, 15 bp, Homo sapiens
ggcagatcccttgag

SEQ ID NO: 2123467 - DNA, 15 bp, Homo sapiens
gcagatcccttgagg

SEQ ID NO: 2123468 - DNA, 15 bp, Homo sapiens
cagatcccttgaggt

SEQ ID NO: 2123469 - DNA, 15 bp, Homo sapiens
agatcccttgaggtt

SEQ ID NO: 2123470 - DNA, 15 bp, Homo sapiens
gatcccttgaggtta

SEQ ID NO: 2123471 - DNA, 15 bp, Homo sapiens
atcccttgaggttag

SEQ ID NO: 2123472 - DNA, 15 bp, Homo sapiens
tcccttgaggttagg

SEQ ID NO: 2123473 - DNA, 15 bp, Homo sapiens
cccttgaggttagga

SEQ ID NO: 2123474 - DNA, 15 bp, Homo sapiens
ccttgaggttaggaa

SEQ ID NO: 2123475 - DNA, 15 bp, Homo sapiens
cttgaggttaggaat

SEQ ID NO: 2123476 - DNA, 15 bp, Homo sapiens
ttgaggttaggaatt

SEQ ID NO: 2123477 - DNA, 15 bp, Homo sapiens
tgaggttaggaattc

SEQ ID NO: 2123478 - DNA, 15 bp, Homo sapiens
gaggttaggaattcg

SEQ ID NO: 2123479 - DNA, 15 bp, Homo sapiens
aggttaggaattcga

SEQ ID NO: 2123480 - DNA, 15 bp, Homo sapiens
ggttaggaattcgat

SEQ ID NO: 2123481 - DNA, 15 bp, Homo sapiens
gttaggaattcgata

SEQ ID NO: 2123482 - DNA, 15 bp, Homo sapiens
ttaggaattcgatac

SEQ ID NO: 2123483 - DNA, 15 bp, Homo sapiens
taggaattcgatacc

SEQ ID NO: 2123484 - DNA, 15 bp, Homo sapiens
aggaattcgatacca

SEQ ID NO: 2123485 - DNA, 15 bp, Homo sapiens
ggaattcgataccag

SEQ ID NO: 2123486 - DNA, 15 bp, Homo sapiens
gaattcgataccagc

SEQ ID NO: 2123487 - DNA, 15 bp, Homo sapiens
aattcgataccagcc

SEQ ID NO: 2123488 - DNA, 15 bp, Homo sapiens
attcgataccagcct

SEQ ID NO: 2123489 - DNA, 15 bp, Homo sapiens
ttcgataccagcctg

SEQ ID NO: 2123490 - DNA, 15 bp, Homo sapiens
tcgataccagcctgg

SEQ ID NO: 2123491 - DNA, 15 bp, Homo sapiens
cgataccagcctggc

SEQ ID NO: 2123492 - DNA, 15 bp, Homo sapiens
gataccagcctggca

SEQ ID NO: 2123493 - DNA, 15 bp, Homo sapiens
ataccagcctggcaa

SEQ ID NO: 2123494 - DNA, 15 bp, Homo sapiens
taccagcctggcaag

SEQ ID NO: 2123495 - DNA, 15 bp, Homo sapiens
accagcctggcaagc

SEQ ID NO: 2123496 - DNA, 15 bp, Homo sapiens
ccagcctggcaagca

SEQ ID NO: 2123497 - DNA, 15 bp, Homo sapiens
cagcctggcaagcat

SEQ ID NO: 2123498 - DNA, 15 bp, Homo sapiens
agcctggcaagcatg

SEQ ID NO: 2123499 - DNA, 15 bp, Homo sapiens
gcctggcaagcatgg

SEQ ID NO: 2123500 - DNA, 15 bp, Homo sapiens
cctggcaagcatggt

SEQ ID NO: 2123501 - DNA, 15 bp, Homo sapiens
ctggcaagcatggtg

SEQ ID NO: 2123502 - DNA, 15 bp, Homo sapiens
tggcaagcatggtga

SEQ ID NO: 2123503 - DNA, 15 bp, Homo sapiens
ggcaagcatggtgaa

SEQ ID NO: 2123504 - DNA, 15 bp, Homo sapiens
gcaagcatggtgaaa

SEQ ID NO: 2123505 - DNA, 15 bp, Homo sapiens
caagcatggtgaaac

SEQ ID NO: 2123506 - DNA, 15 bp, Homo sapiens
aagcatggtgaaacc

SEQ ID NO: 2123507 - DNA, 15 bp, Homo sapiens
gcatggtgaaacccc

SEQ ID NO: 2123508 - DNA, 15 bp, Homo sapiens
gaaaccccgtctctg

SEQ ID NO: 2123509 - DNA, 15 bp, Homo sapiens
aaaccccgtctctgc

SEQ ID NO: 2123510 - DNA, 15 bp, Homo sapiens
aaccccgtctctgct

SEQ ID NO: 2123511 - DNA, 15 bp, Homo sapiens
accccgtctctgcta

SEQ ID NO: 2123512 - DNA, 15 bp, Homo sapiens
ccccgtctctgctaa

SEQ ID NO: 2123513 - DNA, 15 bp, Homo sapiens
cccgtctctgctaaa

SEQ ID NO: 2123514 - DNA, 15 bp, Homo sapiens
ccgtctctgctaaaa

SEQ ID NO: 2123515 - DNA, 15 bp, Homo sapiens
cgtctctgctaaaaa

SEQ ID NO: 2123516 - DNA, 15 bp, Homo sapiens
gtctctgctaaaaat

SEQ ID NO: 2123517 - DNA, 15 bp, Homo sapiens
tctctgctaaaaata

SEQ ID NO: 2123518 - DNA, 15 bp, Homo sapiens
ctctgctaaaaatac

SEQ ID NO: 2123519 - DNA, 15 bp, Homo sapiens
tctgctaaaaataca

SEQ ID NO: 2123520 - DNA, 15 bp, Homo sapiens
ctgctaaaaatacaa

SEQ ID NO: 2123521 - DNA, 15 bp, Homo sapiens
tgctaaaaatacaaa

SEQ ID NO: 2123522 - DNA, 15 bp, Homo sapiens
gctaaaaatacaaaa

SEQ ID NO: 2123523 - DNA, 15 bp, Homo sapiens
gcatggtggcacacg

SEQ ID NO: 2123524 - DNA, 15 bp, Homo sapiens
catggtggcacacgc

SEQ ID NO: 2123525 - DNA, 15 bp, Homo sapiens
atggtggcacacgcc

SEQ ID NO: 2123526 - DNA, 15 bp, Homo sapiens
tcacttgaacccggg

SEQ ID NO: 2123527 - DNA, 15 bp, Homo sapiens
cacttgaacccggga

SEQ ID NO: 2123528 - DNA, 15 bp, Homo sapiens
acttgaacccgggag

SEQ ID NO: 2123529 - DNA, 15 bp, Homo sapiens
aacccgggaggcagt

SEQ ID NO: 2123530 - DNA, 15 bp, Homo sapiens
acccgggaggcagtg

SEQ ID NO: 2123531 - DNA, 15 bp, Homo sapiens
cccgggaggcagtgg

SEQ ID NO: 2123532 - DNA, 15 bp, Homo sapiens
ccgggaggcagtggt

SEQ ID NO: 2123533 - DNA, 15 bp, Homo sapiens
cgggaggcagtggtt

SEQ ID NO: 2123534 - DNA, 15 bp, Homo sapiens
gggaggcagtggttg

SEQ ID NO: 2123535 - DNA, 15 bp, Homo sapiens
ggaggcagtggttgt

SEQ ID NO: 2123536 - DNA, 15 bp, Homo sapiens
gaggcagtggttgta

SEQ ID NO: 2123537 - DNA, 15 bp, Homo sapiens
aggcagtggttgtag

SEQ ID NO: 2123538 - DNA, 15 bp, Homo sapiens
ggcagtggttgtagt

SEQ ID NO: 2123539 - DNA, 15 bp, Homo sapiens
gcagtggttgtagtg

SEQ ID NO: 2123540 - DNA, 15 bp, Homo sapiens
cagtggttgtagtga

SEQ ID NO: 2123541 - DNA, 15 bp, Homo sapiens
agtggttgtagtgag

SEQ ID NO: 2123542 - DNA, 15 bp, Homo sapiens
gtggttgtagtgagc

SEQ ID NO: 2123543 - DNA, 15 bp, Homo sapiens
tggttgtagtgagcc

SEQ ID NO: 2123544 - DNA, 15 bp, Homo sapiens
tgtagtgagccgaga

SEQ ID NO: 2123545 - DNA, 15 bp, Homo sapiens
gtagtgagccgagat

SEQ ID NO: 2123546 - DNA, 15 bp, Homo sapiens
tagtgagccgagatt

SEQ ID NO: 2123547 - DNA, 15 bp, Homo sapiens
gtgccactgcactct

SEQ ID NO: 2123548 - DNA, 15 bp, Homo sapiens
tgccactgcactctg

SEQ ID NO: 2123549 - DNA, 15 bp, Homo sapiens
gccactgcactctgg

SEQ ID NO: 2123550 - DNA, 15 bp, Homo sapiens
cactctggcctgggc

SEQ ID NO: 2123551 - DNA, 15 bp, Homo sapiens
actctggcctgggct

SEQ ID NO: 2123552 - DNA, 15 bp, Homo sapiens
ctctggcctgggcta

SEQ ID NO: 2123553 - DNA, 15 bp, Homo sapiens
tctggcctgggctac

SEQ ID NO: 2123554 - DNA, 15 bp, Homo sapiens
ctggcctgggctaca

SEQ ID NO: 2123555 - DNA, 15 bp, Homo sapiens
tggcctgggctacag

SEQ ID NO: 2123556 - DNA, 15 bp, Homo sapiens
ggcctgggctacaga

SEQ ID NO: 2123557 - DNA, 15 bp, Homo sapiens
gcctgggctacagag

SEQ ID NO: 2123558 - DNA, 15 bp, Homo sapiens
cctgggctacagagt

SEQ ID NO: 2123559 - DNA, 15 bp, Homo sapiens
ctgggctacagagtg

SEQ ID NO: 2123560 - DNA, 15 bp, Homo sapiens
tgggctacagagtga

SEQ ID NO: 2123561 - DNA, 15 bp, Homo sapiens
gggctacagagtgag

SEQ ID NO: 2123562 - DNA, 15 bp, Homo sapiens
ggctacagagtgaga

SEQ ID NO: 2123563 - DNA, 15 bp, Homo sapiens
gctacagagtgagac

SEQ ID NO: 2123564 - DNA, 15 bp, Homo sapiens
ctacagagtgagact

SEQ ID NO: 2123565 - DNA, 15 bp, Homo sapiens
tacagagtgagactc

SEQ ID NO: 2123566 - DNA, 15 bp, Homo sapiens
gagtgagactctgcc

SEQ ID NO: 2123567 - DNA, 15 bp, Homo sapiens
agtgagactctgcct

SEQ ID NO: 2123568 - DNA, 15 bp, Homo sapiens
gtgagactctgcctc

SEQ ID NO: 2123569 - DNA, 15 bp, Homo sapiens
tgagactctgcctca

SEQ ID NO: 2123570 - DNA, 15 bp, Homo sapiens
gagactctgcctcaa

SEQ ID NO: 2123571 - DNA, 15 bp, Homo sapiens
agactctgcctcaaa

SEQ ID NO: 2123572 - DNA, 15 bp, Homo sapiens
gactctgcctcaaac

SEQ ID NO: 2123573 - DNA, 15 bp, Homo sapiens
actctgcctcaaaca

SEQ ID NO: 2123574 - DNA, 15 bp, Homo sapiens
ctctgcctcaaacaa

SEQ ID NO: 2123575 - DNA, 15 bp, Homo sapiens
tctgcctcaaacaaa

SEQ ID NO: 2123576 - DNA, 15 bp, Homo sapiens
gcctcaaacaaaaaa

SEQ ID NO: 2123577 - DNA, 15 bp, Homo sapiens
cctcaaacaaaaaac

SEQ ID NO: 2123578 - DNA, 15 bp, Homo sapiens
ctcaaacaaaaaaca

SEQ ID NO: 2123579 - DNA, 15 bp, Homo sapiens
tcaaacaaaaaacaa

SEQ ID NO: 2123580 - DNA, 15 bp, Homo sapiens
caaacaaaaaacaat

SEQ ID NO: 2123581 - DNA, 15 bp, Homo sapiens
aaacaaaaaacaatc

SEQ ID NO: 2123582 - DNA, 15 bp, Homo sapiens
aacaaaaaacaatca

SEQ ID NO: 2123583 - DNA, 15 bp, Homo sapiens
acaaaaaacaatcaa

SEQ ID NO: 2123584 - DNA, 15 bp, Homo sapiens
caaaaaacaatcaaa

SEQ ID NO: 2123585 - DNA, 15 bp, Homo sapiens
aaaaaacaatcaaac

SEQ ID NO: 2123586 - DNA, 15 bp, Homo sapiens
aaaaacaatcaaaca

SEQ ID NO: 2123587 - DNA, 15 bp, Homo sapiens
aaaacaatcaaacaa

SEQ ID NO: 2123588 - DNA, 15 bp, Homo sapiens
aaacaatcaaacaaa

SEQ ID NO: 2123589 - DNA, 15 bp, Homo sapiens
aacaatcaaacaaaa

SEQ ID NO: 2123590 - DNA, 15 bp, Homo sapiens
acaatcaaacaaaaa

SEQ ID NO: 2123591 - DNA, 15 bp, Homo sapiens
caatcaaacaaaaac

SEQ ID NO: 2123592 - DNA, 15 bp, Homo sapiens
aatcaaacaaaaacc

SEQ ID NO: 2123593 - DNA, 15 bp, Homo sapiens
atcaaacaaaaacca

SEQ ID NO: 2123594 - DNA, 15 bp, Homo sapiens
tcaaacaaaaaccaa

SEQ ID NO: 2123595 - DNA, 15 bp, Homo sapiens
caaacaaaaaccaaa

SEQ ID NO: 2123596 - DNA, 15 bp, Homo sapiens
aaacaaaaaccaaat

SEQ ID NO: 2123597 - DNA, 15 bp, Homo sapiens
aacaaaaaccaaata

SEQ ID NO: 2123598 - DNA, 15 bp, Homo sapiens
acaaaaaccaaatag

SEQ ID NO: 2123599 - DNA, 15 bp, Homo sapiens
caaaaaccaaatagc

SEQ ID NO: 2123600 - DNA, 15 bp, Homo sapiens
aaaaaccaaatagca

SEQ ID NO: 2123601 - DNA, 15 bp, Homo sapiens
aaaaccaaatagcaa

SEQ ID NO: 2123602 - DNA, 15 bp, Homo sapiens
aaaccaaatagcaaa

SEQ ID NO: 2123603 - DNA, 15 bp, Homo sapiens
aaccaaatagcaaac

SEQ ID NO: 2123604 - DNA, 15 bp, Homo sapiens
accaaatagcaaaca

SEQ ID NO: 2123605 - DNA, 15 bp, Homo sapiens
ccaaatagcaaacag

SEQ ID NO: 2123606 - DNA, 15 bp, Homo sapiens
caaatagcaaacaga

SEQ ID NO: 2123607 - DNA, 15 bp, Homo sapiens
aaatagcaaacagat

SEQ ID NO: 2123608 - DNA, 15 bp, Homo sapiens
aatagcaaacagata

SEQ ID NO: 2123609 - DNA, 15 bp, Homo sapiens
atagcaaacagatat

SEQ ID NO: 2123610 - DNA, 15 bp, Homo sapiens
tagcaaacagatata

SEQ ID NO: 2123611 - DNA, 15 bp, Homo sapiens
agcaaacagatatat

SEQ ID NO: 2123612 - DNA, 15 bp, Homo sapiens
gcaaacagatatatg

SEQ ID NO: 2123613 - DNA, 15 bp, Homo sapiens
caaacagatatatga

SEQ ID NO: 2123614 - DNA, 15 bp, Homo sapiens
aaacagatatatgaa

SEQ ID NO: 2123615 - DNA, 15 bp, Homo sapiens
aacagatatatgaaa

SEQ ID NO: 2123616 - DNA, 15 bp, Homo sapiens
acagatatatgaaaa

SEQ ID NO: 2123617 - DNA, 15 bp, Homo sapiens
cagatatatgaaaaa

SEQ ID NO: 2123618 - DNA, 15 bp, Homo sapiens
agatatatgaaaaag

SEQ ID NO: 2123619 - DNA, 15 bp, Homo sapiens
gatatatgaaaaagt

SEQ ID NO: 2123620 - DNA, 15 bp, Homo sapiens
atatatgaaaaagtg

SEQ ID NO: 2123621 - DNA, 15 bp, Homo sapiens
tatatgaaaaagtgc

SEQ ID NO: 2123622 - DNA, 15 bp, Homo sapiens
atatgaaaaagtgct

SEQ ID NO: 2123623 - DNA, 15 bp, Homo sapiens
tatgaaaaagtgctc

SEQ ID NO: 2123624 - DNA, 15 bp, Homo sapiens
atgaaaaagtgctca

SEQ ID NO: 2123625 - DNA, 15 bp, Homo sapiens
tgaaaaagtgctcaa

SEQ ID NO: 2123626 - DNA, 15 bp, Homo sapiens
gaaaaagtgctcaat

SEQ ID NO: 2123627 - DNA, 15 bp, Homo sapiens
aaaaagtgctcaata

SEQ ID NO: 2123628 - DNA, 15 bp, Homo sapiens
aaaagtgctcaatat

SEQ ID NO: 2123629 - DNA, 15 bp, Homo sapiens
aaagtgctcaatatc

SEQ ID NO: 2123630 - DNA, 15 bp, Homo sapiens
aagtgctcaatatca

SEQ ID NO: 2123631 - DNA, 15 bp, Homo sapiens
agtgctcaatatcaa

SEQ ID NO: 2123632 - DNA, 15 bp, Homo sapiens
gtgctcaatatcaat

SEQ ID NO: 2123633 - DNA, 15 bp, Homo sapiens
tgctcaatatcaata

SEQ ID NO: 2123634 - DNA, 15 bp, Homo sapiens
gctcaatatcaataa

SEQ ID NO: 2123635 - DNA, 15 bp, Homo sapiens
ctcaatatcaataat

SEQ ID NO: 2123636 - DNA, 15 bp, Homo sapiens
tcaatatcaataatc

SEQ ID NO: 2123637 - DNA, 15 bp, Homo sapiens
caatatcaataatca

SEQ ID NO: 2123638 - DNA, 15 bp, Homo sapiens
aatatcaataatcat

SEQ ID NO: 2123639 - DNA, 15 bp, Homo sapiens
atatcaataatcatc

SEQ ID NO: 2123640 - DNA, 15 bp, Homo sapiens
tatcaataatcatca

SEQ ID NO: 2123641 - DNA, 15 bp, Homo sapiens
atcaataatcatcac

SEQ ID NO: 2123642 - DNA, 15 bp, Homo sapiens
tcaataatcatcaca

SEQ ID NO: 2123643 - DNA, 15 bp, Homo sapiens
caataatcatcacaa

SEQ ID NO: 2123644 - DNA, 15 bp, Homo sapiens
aataatcatcacaaa

SEQ ID NO: 2123645 - DNA, 15 bp, Homo sapiens
ataatcatcacaaaa

SEQ ID NO: 2123646 - DNA, 15 bp, Homo sapiens
taatcatcacaaaaa

SEQ ID NO: 2123647 - DNA, 15 bp, Homo sapiens
aatcatcacaaaaat

SEQ ID NO: 2123648 - DNA, 15 bp, Homo sapiens
atcatcacaaaaatg

SEQ ID NO: 2123649 - DNA, 15 bp, Homo sapiens
tcatcacaaaaatgc

SEQ ID NO: 2123650 - DNA, 15 bp, Homo sapiens
catcacaaaaatgca

SEQ ID NO: 2123651 - DNA, 15 bp, Homo sapiens
atcacaaaaatgcac

SEQ ID NO: 2123652 - DNA, 15 bp, Homo sapiens
tcacaaaaatgcaca

SEQ ID NO: 2123653 - DNA, 15 bp, Homo sapiens
cacaaaaatgcacat

SEQ ID NO: 2123654 - DNA, 15 bp, Homo sapiens
acaaaaatgcacatc

SEQ ID NO: 2123655 - DNA, 15 bp, Homo sapiens
caaaaatgcacatca

SEQ ID NO: 2123656 - DNA, 15 bp, Homo sapiens
aaaaatgcacatcag

SEQ ID NO: 2123657 - DNA, 15 bp, Homo sapiens
aaaatgcacatcagg

SEQ ID NO: 2123658 - DNA, 15 bp, Homo sapiens
aaatgcacatcaggc

SEQ ID NO: 2123659 - DNA, 15 bp, Homo sapiens
aatgcacatcaggct

SEQ ID NO: 2123660 - DNA, 15 bp, Homo sapiens
atgcacatcaggctg

SEQ ID NO: 2123661 - DNA, 15 bp, Homo sapiens
tgcacatcaggctgg

SEQ ID NO: 2123662 - DNA, 15 bp, Homo sapiens
gcacatcaggctggg

SEQ ID NO: 2123663 - DNA, 15 bp, Homo sapiens
cacatcaggctgggt

SEQ ID NO: 2123664 - DNA, 15 bp, Homo sapiens
acatcaggctgggtg

SEQ ID NO: 2123665 - DNA, 15 bp, Homo sapiens
catcaggctgggtgt

SEQ ID NO: 2123666 - DNA, 15 bp, Homo sapiens
atcaggctgggtgtg

SEQ ID NO: 2123667 - DNA, 15 bp, Homo sapiens
tcaggctgggtgtgg

SEQ ID NO: 2123668 - DNA, 15 bp, Homo sapiens
gtgtggtggctcaca

SEQ ID NO: 2123669 - DNA, 15 bp, Homo sapiens
tgtggtggctcacac

SEQ ID NO: 2123670 - DNA, 15 bp, Homo sapiens
gtggtggctcacacc

SEQ ID NO: 2123671 - DNA, 15 bp, Homo sapiens
ttgggaggccaaagc

SEQ ID NO: 2123672 - DNA, 15 bp, Homo sapiens
tgggaggccaaagcg

SEQ ID NO: 2123673 - DNA, 15 bp, Homo sapiens
gggaggccaaagcgg

SEQ ID NO: 2123674 - DNA, 15 bp, Homo sapiens
ggaggccaaagcggg

SEQ ID NO: 2123675 - DNA, 15 bp, Homo sapiens
gaggccaaagcgggt

SEQ ID NO: 2123676 - DNA, 15 bp, Homo sapiens
aggccaaagcgggtg

SEQ ID NO: 2123677 - DNA, 15 bp, Homo sapiens
ggccaaagcgggtgg

SEQ ID NO: 2123678 - DNA, 15 bp, Homo sapiens
gccaaagcgggtgga

SEQ ID NO: 2123679 - DNA, 15 bp, Homo sapiens
ccaaagcgggtggat

SEQ ID NO: 2123680 - DNA, 15 bp, Homo sapiens
caaagcgggtggatc

SEQ ID NO: 2123681 - DNA, 15 bp, Homo sapiens
aaagcgggtggatca

SEQ ID NO: 2123682 - DNA, 15 bp, Homo sapiens
aagcgggtggatcac

SEQ ID NO: 2123683 - DNA, 15 bp, Homo sapiens
agcgggtggatcact

SEQ ID NO: 2123684 - DNA, 15 bp, Homo sapiens
tcaagaccagcctgc

SEQ ID NO: 2123685 - DNA, 15 bp, Homo sapiens
caagaccagcctgcc

SEQ ID NO: 2123686 - DNA, 15 bp, Homo sapiens
aagaccagcctgccc

SEQ ID NO: 2123687 - DNA, 15 bp, Homo sapiens
agaccagcctgccca

SEQ ID NO: 2123688 - DNA, 15 bp, Homo sapiens
gaccagcctgcccaa

SEQ ID NO: 2123689 - DNA, 15 bp, Homo sapiens
accagcctgcccaat

SEQ ID NO: 2123690 - DNA, 15 bp, Homo sapiens
ccagcctgcccaata

SEQ ID NO: 2123691 - DNA, 15 bp, Homo sapiens
cagcctgcccaatat

SEQ ID NO: 2123692 - DNA, 15 bp, Homo sapiens
agcctgcccaatata

SEQ ID NO: 2123693 - DNA, 15 bp, Homo sapiens
gcctgcccaatatag

SEQ ID NO: 2123694 - DNA, 15 bp, Homo sapiens
cctgcccaatatagt

SEQ ID NO: 2123695 - DNA, 15 bp, Homo sapiens
ctgcccaatatagtg

SEQ ID NO: 2123696 - DNA, 15 bp, Homo sapiens
tgcccaatatagtga

SEQ ID NO: 2123697 - DNA, 15 bp, Homo sapiens
gcccaatatagtgaa

SEQ ID NO: 2123698 - DNA, 15 bp, Homo sapiens
cccaatatagtgaaa

SEQ ID NO: 2123699 - DNA, 15 bp, Homo sapiens
caatatagtgaaaca

SEQ ID NO: 2123700 - DNA, 15 bp, Homo sapiens
aatatagtgaaacat

SEQ ID NO: 2123701 - DNA, 15 bp, Homo sapiens
atatagtgaaacatc

SEQ ID NO: 2123702 - DNA, 15 bp, Homo sapiens
tatagtgaaacatct

SEQ ID NO: 2123703 - DNA, 15 bp, Homo sapiens
atagtgaaacatctt

SEQ ID NO: 2123704 - DNA, 15 bp, Homo sapiens
tagtgaaacatcttc

SEQ ID NO: 2123705 - DNA, 15 bp, Homo sapiens
agtgaaacatcttct

SEQ ID NO: 2123706 - DNA, 15 bp, Homo sapiens
gtgaaacatcttctc

SEQ ID NO: 2123707 - DNA, 15 bp, Homo sapiens
tgaaacatcttctct

SEQ ID NO: 2123708 - DNA, 15 bp, Homo sapiens
gaaacatcttctcta

SEQ ID NO: 2123709 - DNA, 15 bp, Homo sapiens
aaacatcttctctac

SEQ ID NO: 2123710 - DNA, 15 bp, Homo sapiens
aacatcttctctact

SEQ ID NO: 2123711 - DNA, 15 bp, Homo sapiens
acatcttctctacta

SEQ ID NO: 2123712 - DNA, 15 bp, Homo sapiens
catcttctctactaa

SEQ ID NO: 2123713 - DNA, 15 bp, Homo sapiens
atcttctctactaaa

SEQ ID NO: 2123714 - DNA, 15 bp, Homo sapiens
tcttctctactaaaa

SEQ ID NO: 2123715 - DNA, 15 bp, Homo sapiens
ttctctactaaaaat

SEQ ID NO: 2123716 - DNA, 15 bp, Homo sapiens
tgggcatggtggtgg

SEQ ID NO: 2123717 - DNA, 15 bp, Homo sapiens
ggcatggtggtgggt

SEQ ID NO: 2123718 - DNA, 15 bp, Homo sapiens
gcatggtggtgggtg

SEQ ID NO: 2123719 - DNA, 15 bp, Homo sapiens
catggtggtgggtgc

SEQ ID NO: 2123720 - DNA, 15 bp, Homo sapiens
tgcctgtaatcccac

SEQ ID NO: 2123721 - DNA, 15 bp, Homo sapiens
cctgtaatcccaccc

SEQ ID NO: 2123722 - DNA, 15 bp, Homo sapiens
ctgtaatcccacccg

SEQ ID NO: 2123723 - DNA, 15 bp, Homo sapiens
tgtaatcccacccgc

SEQ ID NO: 2123724 - DNA, 15 bp, Homo sapiens
gtaatcccacccgct

SEQ ID NO: 2123725 - DNA, 15 bp, Homo sapiens
taatcccacccgctc

SEQ ID NO: 2123726 - DNA, 15 bp, Homo sapiens
aatcccacccgctca

SEQ ID NO: 2123727 - DNA, 15 bp, Homo sapiens
atcccacccgctcag

SEQ ID NO: 2123728 - DNA, 15 bp, Homo sapiens
tcccacccgctcagg

SEQ ID NO: 2123729 - DNA, 15 bp, Homo sapiens
cccacccgctcagga

SEQ ID NO: 2123730 - DNA, 15 bp, Homo sapiens
ccacccgctcaggag

SEQ ID NO: 2123731 - DNA, 15 bp, Homo sapiens
cacccgctcaggagg

SEQ ID NO: 2123732 - DNA, 15 bp, Homo sapiens
acccgctcaggaggc

SEQ ID NO: 2123733 - DNA, 15 bp, Homo sapiens
cccgctcaggaggct

SEQ ID NO: 2123734 - DNA, 15 bp, Homo sapiens
ccgctcaggaggctg

SEQ ID NO: 2123735 - DNA, 15 bp, Homo sapiens
cgctcaggaggctga

SEQ ID NO: 2123736 - DNA, 15 bp, Homo sapiens
gatcacttgaacccg

SEQ ID NO: 2123737 - DNA, 15 bp, Homo sapiens
cccgggaggcagagg

SEQ ID NO: 2123738 - DNA, 15 bp, Homo sapiens
ccgggaggcagaggt

SEQ ID NO: 2123739 - DNA, 15 bp, Homo sapiens
aggcagaggttgcaa

SEQ ID NO: 2123740 - DNA, 15 bp, Homo sapiens
ggcagaggttgcaat

SEQ ID NO: 2123741 - DNA, 15 bp, Homo sapiens
gcagaggttgcaatg

SEQ ID NO: 2123742 - DNA, 15 bp, Homo sapiens
cagaggttgcaatga

SEQ ID NO: 2123743 - DNA, 15 bp, Homo sapiens
agaggttgcaatgag

SEQ ID NO: 2123744 - DNA, 15 bp, Homo sapiens
gaggttgcaatgagc

SEQ ID NO: 2123745 - DNA, 15 bp, Homo sapiens
aggttgcaatgagcc

SEQ ID NO: 2123746 - DNA, 15 bp, Homo sapiens
ggttgcaatgagccg

SEQ ID NO: 2123747 - DNA, 15 bp, Homo sapiens
gttgcaatgagccga

SEQ ID NO: 2123748 - DNA, 15 bp, Homo sapiens
ttgcaatgagccgag

SEQ ID NO: 2123749 - DNA, 15 bp, Homo sapiens
tgcaatgagccgaga

SEQ ID NO: 2123750 - DNA, 15 bp, Homo sapiens
gcaatgagccgagat

SEQ ID NO: 2123751 - DNA, 15 bp, Homo sapiens
caatgagccgagatg

SEQ ID NO: 2123752 - DNA, 15 bp, Homo sapiens
aatgagccgagatgg

SEQ ID NO: 2123753 - DNA, 15 bp, Homo sapiens
atgagccgagatggc

SEQ ID NO: 2123754 - DNA, 15 bp, Homo sapiens
tgagccgagatggca

SEQ ID NO: 2123755 - DNA, 15 bp, Homo sapiens
gagccgagatggcac

SEQ ID NO: 2123756 - DNA, 15 bp, Homo sapiens
agccgagatggcacc

SEQ ID NO: 2123757 - DNA, 15 bp, Homo sapiens
gccgagatggcacca

SEQ ID NO: 2123758 - DNA, 15 bp, Homo sapiens
ccgagatggcaccac

SEQ ID NO: 2123759 - DNA, 15 bp, Homo sapiens
cgagatggcaccact

SEQ ID NO: 2123760 - DNA, 15 bp, Homo sapiens
atggcaccactgcac

SEQ ID NO: 2123761 - DNA, 15 bp, Homo sapiens
tggcaccactgcact

SEQ ID NO: 2123762 - DNA, 15 bp, Homo sapiens
ggcaccactgcactt

SEQ ID NO: 2123763 - DNA, 15 bp, Homo sapiens
gcaccactgcacttt

SEQ ID NO: 2123764 - DNA, 15 bp, Homo sapiens
caccactgcactttc

SEQ ID NO: 2123765 - DNA, 15 bp, Homo sapiens
accactgcactttct

SEQ ID NO: 2123766 - DNA, 15 bp, Homo sapiens
ccactgcactttctg

SEQ ID NO: 2123767 - DNA, 15 bp, Homo sapiens
cactgcactttctgt

SEQ ID NO: 2123768 - DNA, 15 bp, Homo sapiens
actgcactttctgta

SEQ ID NO: 2123769 - DNA, 15 bp, Homo sapiens
ctgcactttctgtag

SEQ ID NO: 2123770 - DNA, 15 bp, Homo sapiens
tgcactttctgtagc

SEQ ID NO: 2123771 - DNA, 15 bp, Homo sapiens
gcactttctgtagcc

SEQ ID NO: 2123772 - DNA, 15 bp, Homo sapiens
cactttctgtagcct

SEQ ID NO: 2123773 - DNA, 15 bp, Homo sapiens
actttctgtagcctg

SEQ ID NO: 2123774 - DNA, 15 bp, Homo sapiens
ctttctgtagcctgg

SEQ ID NO: 2123775 - DNA, 15 bp, Homo sapiens
tttctgtagcctggg

SEQ ID NO: 2123776 - DNA, 15 bp, Homo sapiens
ttctgtagcctgggc

SEQ ID NO: 2123777 - DNA, 15 bp, Homo sapiens
tctgtagcctgggca

SEQ ID NO: 2123778 - DNA, 15 bp, Homo sapiens
caacagaatgagact

SEQ ID NO: 2123779 - DNA, 15 bp, Homo sapiens
aacagaatgagactg

SEQ ID NO: 2123780 - DNA, 15 bp, Homo sapiens
acagaatgagactgt

SEQ ID NO: 2123781 - DNA, 15 bp, Homo sapiens
cagaatgagactgtg

SEQ ID NO: 2123782 - DNA, 15 bp, Homo sapiens
agaatgagactgtgt

SEQ ID NO: 2123783 - DNA, 15 bp, Homo sapiens
gaatgagactgtgtc

SEQ ID NO: 2123784 - DNA, 15 bp, Homo sapiens
aatgagactgtgtct

SEQ ID NO: 2123785 - DNA, 15 bp, Homo sapiens
atgagactgtgtcta

SEQ ID NO: 2123786 - DNA, 15 bp, Homo sapiens
tgagactgtgtctaa

SEQ ID NO: 2123787 - DNA, 15 bp, Homo sapiens
gagactgtgtctaaa

SEQ ID NO: 2123788 - DNA, 15 bp, Homo sapiens
agactgtgtctaaaa

SEQ ID NO: 2123789 - DNA, 15 bp, Homo sapiens
gactgtgtctaaaaa

SEQ ID NO: 2123790 - DNA, 15 bp, Homo sapiens
actgtgtctaaaaac

SEQ ID NO: 2123791 - DNA, 15 bp, Homo sapiens
ctgtgtctaaaaaca

SEQ ID NO: 2123792 - DNA, 15 bp, Homo sapiens
tgtgtctaaaaacat

SEQ ID NO: 2123793 - DNA, 15 bp, Homo sapiens
gtgtctaaaaacata

SEQ ID NO: 2123794 - DNA, 15 bp, Homo sapiens
tgtctaaaaacataa

SEQ ID NO: 2123795 - DNA, 15 bp, Homo sapiens
gtctaaaaacataaa

SEQ ID NO: 2123796 - DNA, 15 bp, Homo sapiens
tctaaaaacataaat

SEQ ID NO: 2123797 - DNA, 15 bp, Homo sapiens
ctaaaaacataaata

SEQ ID NO: 2123798 - DNA, 15 bp, Homo sapiens
taaaaacataaataa

SEQ ID NO: 2123799 - DNA, 15 bp, Homo sapiens
aaaaacataaataaa

SEQ ID NO: 2123800 - DNA, 15 bp, Homo sapiens
aaaacataaataaat

SEQ ID NO: 2123801 - DNA, 15 bp, Homo sapiens
aaacataaataaata

SEQ ID NO: 2123802 - DNA, 15 bp, Homo sapiens
aacataaataaataa

SEQ ID NO: 2123803 - DNA, 15 bp, Homo sapiens
acataaataaataag

SEQ ID NO: 2123804 - DNA, 15 bp, Homo sapiens
cataaataaataagg

SEQ ID NO: 2123805 - DNA, 15 bp, Homo sapiens
ataaataaataaggc

SEQ ID NO: 2123806 - DNA, 15 bp, Homo sapiens
taaataaataaggcc

SEQ ID NO: 2123807 - DNA, 15 bp, Homo sapiens
aaataaataaggcca

SEQ ID NO: 2123808 - DNA, 15 bp, Homo sapiens
aataaataaggccag

SEQ ID NO: 2123809 - DNA, 15 bp, Homo sapiens
ataaataaggccagg

SEQ ID NO: 2123810 - DNA, 15 bp, Homo sapiens
taaataaggccaggc

SEQ ID NO: 2123811 - DNA, 15 bp, Homo sapiens
aaataaggccaggcg

SEQ ID NO: 2123812 - DNA, 15 bp, Homo sapiens
aataaggccaggcgc

SEQ ID NO: 2123813 - DNA, 15 bp, Homo sapiens
ataaggccaggcgca

SEQ ID NO: 2123814 - DNA, 15 bp, Homo sapiens
taaggccaggcgcag

SEQ ID NO: 2123815 - DNA, 15 bp, Homo sapiens
aaggccaggcgcagt

SEQ ID NO: 2123816 - DNA, 15 bp, Homo sapiens
aggccaggcgcagtg

SEQ ID NO: 2123817 - DNA, 15 bp, Homo sapiens
ggccaggcgcagtgg

SEQ ID NO: 2123818 - DNA, 15 bp, Homo sapiens
gccaggcgcagtggt

SEQ ID NO: 2123819 - DNA, 15 bp, Homo sapiens
ccaggcgcagtggtt

SEQ ID NO: 2123820 - DNA, 15 bp, Homo sapiens
caggcgcagtggttc

SEQ ID NO: 2123821 - DNA, 15 bp, Homo sapiens
aggcgcagtggttca

SEQ ID NO: 2123822 - DNA, 15 bp, Homo sapiens
ggcgcagtggttcac

SEQ ID NO: 2123823 - DNA, 15 bp, Homo sapiens
gcgcagtggttcaca

SEQ ID NO: 2123824 - DNA, 15 bp, Homo sapiens
cgcagtggttcacat

SEQ ID NO: 2123825 - DNA, 15 bp, Homo sapiens
gcagtggttcacatc

SEQ ID NO: 2123826 - DNA, 15 bp, Homo sapiens
cagtggttcacatct

SEQ ID NO: 2123827 - DNA, 15 bp, Homo sapiens
agtggttcacatctg

SEQ ID NO: 2123828 - DNA, 15 bp, Homo sapiens
gtggttcacatctgt

SEQ ID NO: 2123829 - DNA, 15 bp, Homo sapiens
tggttcacatctgta

SEQ ID NO: 2123830 - DNA, 15 bp, Homo sapiens
ggttcacatctgtaa

SEQ ID NO: 2123831 - DNA, 15 bp, Homo sapiens
gttcacatctgtaat

SEQ ID NO: 2123832 - DNA, 15 bp, Homo sapiens
ttcacatctgtaatc

SEQ ID NO: 2123833 - DNA, 15 bp, Homo sapiens
atctgtaatcccagt

SEQ ID NO: 2123834 - DNA, 15 bp, Homo sapiens
tctgtaatcccagtg

SEQ ID NO: 2123835 - DNA, 15 bp, Homo sapiens
ctgtaatcccagtgt

SEQ ID NO: 2123836 - DNA, 15 bp, Homo sapiens
tgtaatcccagtgtg

SEQ ID NO: 2123837 - DNA, 15 bp, Homo sapiens
gtaatcccagtgtga

SEQ ID NO: 2123838 - DNA, 15 bp, Homo sapiens
taatcccagtgtgat

SEQ ID NO: 2123839 - DNA, 15 bp, Homo sapiens
aatcccagtgtgatt

SEQ ID NO: 2123840 - DNA, 15 bp, Homo sapiens
atcccagtgtgatta

SEQ ID NO: 2123841 - DNA, 15 bp, Homo sapiens
tcccagtgtgattac

SEQ ID NO: 2123842 - DNA, 15 bp, Homo sapiens
cccagtgtgattaca

SEQ ID NO: 2123843 - DNA, 15 bp, Homo sapiens
ccagtgtgattacag

SEQ ID NO: 2123844 - DNA, 15 bp, Homo sapiens
cagtgtgattacaga

SEQ ID NO: 2123845 - DNA, 15 bp, Homo sapiens
agtgtgattacagat

SEQ ID NO: 2123846 - DNA, 15 bp, Homo sapiens
gtgtgattacagatc

SEQ ID NO: 2123847 - DNA, 15 bp, Homo sapiens
tgtgattacagatca

SEQ ID NO: 2123848 - DNA, 15 bp, Homo sapiens
gtgattacagatcac

SEQ ID NO: 2123849 - DNA, 15 bp, Homo sapiens
tgattacagatcaca

SEQ ID NO: 2123850 - DNA, 15 bp, Homo sapiens
gattacagatcacac

SEQ ID NO: 2123851 - DNA, 15 bp, Homo sapiens
attacagatcacact

SEQ ID NO: 2123852 - DNA, 15 bp, Homo sapiens
ttacagatcacactg

SEQ ID NO: 2123853 - DNA, 15 bp, Homo sapiens
tacagatcacactgt

SEQ ID NO: 2123854 - DNA, 15 bp, Homo sapiens
acagatcacactgtg

SEQ ID NO: 2123855 - DNA, 15 bp, Homo sapiens
cagatcacactgtgg

SEQ ID NO: 2123856 - DNA, 15 bp, Homo sapiens
agatcacactgtggg

SEQ ID NO: 2123857 - DNA, 15 bp, Homo sapiens
gatcacactgtggga

SEQ ID NO: 2123858 - DNA, 15 bp, Homo sapiens
atcacactgtgggag

SEQ ID NO: 2123859 - DNA, 15 bp, Homo sapiens
tcacactgtgggagg

SEQ ID NO: 2123860 - DNA, 15 bp, Homo sapiens
cacactgtgggaggc

SEQ ID NO: 2123861 - DNA, 15 bp, Homo sapiens
acactgtgggaggcc

SEQ ID NO: 2123862 - DNA, 15 bp, Homo sapiens
cactgtgggaggcca

SEQ ID NO: 2123863 - DNA, 15 bp, Homo sapiens
actgtgggaggccaa

SEQ ID NO: 2123864 - DNA, 15 bp, Homo sapiens
tgtgggaggccaagg

SEQ ID NO: 2123865 - DNA, 15 bp, Homo sapiens
gtgggaggccaaggc

SEQ ID NO: 2123866 - DNA, 15 bp, Homo sapiens
gcagatcacctgagc

SEQ ID NO: 2123867 - DNA, 15 bp, Homo sapiens
cagatcacctgagct

SEQ ID NO: 2123868 - DNA, 15 bp, Homo sapiens
agatcacctgagctc

SEQ ID NO: 2123869 - DNA, 15 bp, Homo sapiens
gatcacctgagctca

SEQ ID NO: 2123870 - DNA, 15 bp, Homo sapiens
atcacctgagctcag

SEQ ID NO: 2123871 - DNA, 15 bp, Homo sapiens
tcacctgagctcagg

SEQ ID NO: 2123872 - DNA, 15 bp, Homo sapiens
cacctgagctcagga

SEQ ID NO: 2123873 - DNA, 15 bp, Homo sapiens
acctgagctcaggag

SEQ ID NO: 2123874 - DNA, 15 bp, Homo sapiens
cctgagctcaggagt

SEQ ID NO: 2123875 - DNA, 15 bp, Homo sapiens
ctgagctcaggagtt

SEQ ID NO: 2123876 - DNA, 15 bp, Homo sapiens
tgagctcaggagttt

SEQ ID NO: 2123877 - DNA, 15 bp, Homo sapiens
gagctcaggagtttg

SEQ ID NO: 2123878 - DNA, 15 bp, Homo sapiens
agctcaggagtttga

SEQ ID NO: 2123879 - DNA, 15 bp, Homo sapiens
gctcaggagtttgag

SEQ ID NO: 2123880 - DNA, 15 bp, Homo sapiens
ctcaggagtttgaga

SEQ ID NO: 2123881 - DNA, 15 bp, Homo sapiens
tgagaccagcctggt

SEQ ID NO: 2123882 - DNA, 15 bp, Homo sapiens
cagcctggtcaacat

SEQ ID NO: 2123883 - DNA, 15 bp, Homo sapiens
agcctggtcaacatg

SEQ ID NO: 2123884 - DNA, 15 bp, Homo sapiens
gcctggtcaacatgg

SEQ ID NO: 2123885 - DNA, 15 bp, Homo sapiens
cctggtcaacatggt

SEQ ID NO: 2123886 - DNA, 15 bp, Homo sapiens
ctggtcaacatggtg

SEQ ID NO: 2123887 - DNA, 15 bp, Homo sapiens
tggtcaacatggtga

SEQ ID NO: 2123888 - DNA, 15 bp, Homo sapiens
ggtcaacatggtgaa

SEQ ID NO: 2123889 - DNA, 15 bp, Homo sapiens
gtcaacatggtgaac

SEQ ID NO: 2123890 - DNA, 15 bp, Homo sapiens
tcaacatggtgaacc

SEQ ID NO: 2123891 - DNA, 15 bp, Homo sapiens
caacatggtgaaccc

SEQ ID NO: 2123892 - DNA, 15 bp, Homo sapiens
aacatggtgaacccc

SEQ ID NO: 2123893 - DNA, 15 bp, Homo sapiens
acatggtgaaccccc

SEQ ID NO: 2123894 - DNA, 15 bp, Homo sapiens
catggtgaacccccg

SEQ ID NO: 2123895 - DNA, 15 bp, Homo sapiens
atggtgaacccccgt

SEQ ID NO: 2123896 - DNA, 15 bp, Homo sapiens
tggtgaacccccgtc

SEQ ID NO: 2123897 - DNA, 15 bp, Homo sapiens
ggtgaacccccgtct

SEQ ID NO: 2123898 - DNA, 15 bp, Homo sapiens
gtgaacccccgtctc

SEQ ID NO: 2123899 - DNA, 15 bp, Homo sapiens
tgaacccccgtctct

SEQ ID NO: 2123900 - DNA, 15 bp, Homo sapiens
gaacccccgtctcta

SEQ ID NO: 2123901 - DNA, 15 bp, Homo sapiens
aacccccgtctctat

SEQ ID NO: 2123902 - DNA, 15 bp, Homo sapiens
acccccgtctctatt

SEQ ID NO: 2123903 - DNA, 15 bp, Homo sapiens
cccccgtctctatta

SEQ ID NO: 2123904 - DNA, 15 bp, Homo sapiens
ccccgtctctattaa

SEQ ID NO: 2123905 - DNA, 15 bp, Homo sapiens
cccgtctctattaaa

SEQ ID NO: 2123906 - DNA, 15 bp, Homo sapiens
ccgtctctattaaaa

SEQ ID NO: 2123907 - DNA, 15 bp, Homo sapiens
cgtctctattaaaaa

SEQ ID NO: 2123908 - DNA, 15 bp, Homo sapiens
gtctctattaaaaat

SEQ ID NO: 2123909 - DNA, 15 bp, Homo sapiens
tctctattaaaaata

SEQ ID NO: 2123910 - DNA, 15 bp, Homo sapiens
ctctattaaaaatat

SEQ ID NO: 2123911 - DNA, 15 bp, Homo sapiens
tctattaaaaatata

SEQ ID NO: 2123912 - DNA, 15 bp, Homo sapiens
ctattaaaaatatac

SEQ ID NO: 2123913 - DNA, 15 bp, Homo sapiens
tattaaaaatataca

SEQ ID NO: 2123914 - DNA, 15 bp, Homo sapiens
attaaaaatatacaa

SEQ ID NO: 2123915 - DNA, 15 bp, Homo sapiens
ttaaaaatatacaaa

SEQ ID NO: 2123916 - DNA, 15 bp, Homo sapiens
taaaaatatacaaat

SEQ ID NO: 2123917 - DNA, 15 bp, Homo sapiens
aaaaatatacaaatt

SEQ ID NO: 2123918 - DNA, 15 bp, Homo sapiens
aaaatatacaaatta

SEQ ID NO: 2123919 - DNA, 15 bp, Homo sapiens
aaatatacaaattag

SEQ ID NO: 2123920 - DNA, 15 bp, Homo sapiens
aatatacaaattagc

SEQ ID NO: 2123921 - DNA, 15 bp, Homo sapiens
atatacaaattagct

SEQ ID NO: 2123922 - DNA, 15 bp, Homo sapiens
tatacaaattagctg

SEQ ID NO: 2123923 - DNA, 15 bp, Homo sapiens
atacaaattagctgg

SEQ ID NO: 2123924 - DNA, 15 bp, Homo sapiens
tacaaattagctggg

SEQ ID NO: 2123925 - DNA, 15 bp, Homo sapiens
acaaattagctgggc

SEQ ID NO: 2123926 - DNA, 15 bp, Homo sapiens
gggcatggtggcaga

SEQ ID NO: 2123927 - DNA, 15 bp, Homo sapiens
ggcatggtggcagat

SEQ ID NO: 2123928 - DNA, 15 bp, Homo sapiens
gcatggtggcagatg

SEQ ID NO: 2123929 - DNA, 15 bp, Homo sapiens
catggtggcagatgc

SEQ ID NO: 2123930 - DNA, 15 bp, Homo sapiens
atggtggcagatgcc

SEQ ID NO: 2123931 - DNA, 15 bp, Homo sapiens
tggtggcagatgcct

SEQ ID NO: 2123932 - DNA, 15 bp, Homo sapiens
ggtggcagatgccta

SEQ ID NO: 2123933 - DNA, 15 bp, Homo sapiens
gtggcagatgcctat

SEQ ID NO: 2123934 - DNA, 15 bp, Homo sapiens
tggcagatgcctata

SEQ ID NO: 2123935 - DNA, 15 bp, Homo sapiens
ggcagatgcctataa

SEQ ID NO: 2123936 - DNA, 15 bp, Homo sapiens
gcagatgcctataat

SEQ ID NO: 2123937 - DNA, 15 bp, Homo sapiens
cagatgcctataatc

SEQ ID NO: 2123938 - DNA, 15 bp, Homo sapiens
agatgcctataatcc

SEQ ID NO: 2123939 - DNA, 15 bp, Homo sapiens
gatgcctataatcca

SEQ ID NO: 2123940 - DNA, 15 bp, Homo sapiens
atgcctataatccaa

SEQ ID NO: 2123941 - DNA, 15 bp, Homo sapiens
tgcctataatccaag

SEQ ID NO: 2123942 - DNA, 15 bp, Homo sapiens
gcctataatccaagc

SEQ ID NO: 2123943 - DNA, 15 bp, Homo sapiens
cctataatccaagct

SEQ ID NO: 2123944 - DNA, 15 bp, Homo sapiens
ctataatccaagcta

SEQ ID NO: 2123945 - DNA, 15 bp, Homo sapiens
tataatccaagctac

SEQ ID NO: 2123946 - DNA, 15 bp, Homo sapiens
ataatccaagctact

SEQ ID NO: 2123947 - DNA, 15 bp, Homo sapiens
taatccaagctactt

SEQ ID NO: 2123948 - DNA, 15 bp, Homo sapiens
aatccaagctacttg

SEQ ID NO: 2123949 - DNA, 15 bp, Homo sapiens
atccaagctacttgg

SEQ ID NO: 2123950 - DNA, 15 bp, Homo sapiens
tccaagctacttggg

SEQ ID NO: 2123951 - DNA, 15 bp, Homo sapiens
ccaagctacttggga

SEQ ID NO: 2123952 - DNA, 15 bp, Homo sapiens
caagctacttgggag

SEQ ID NO: 2123953 - DNA, 15 bp, Homo sapiens
aagctacttgggagg

SEQ ID NO: 2123954 - DNA, 15 bp, Homo sapiens
gggaggctgaggcat

SEQ ID NO: 2123955 - DNA, 15 bp, Homo sapiens
ggaggctgaggcatg

SEQ ID NO: 2123956 - DNA, 15 bp, Homo sapiens
gaggctgaggcatga

SEQ ID NO: 2123957 - DNA, 15 bp, Homo sapiens
aggctgaggcatgag

SEQ ID NO: 2123958 - DNA, 15 bp, Homo sapiens
ggctgaggcatgaga

SEQ ID NO: 2123959 - DNA, 15 bp, Homo sapiens
gctgaggcatgagaa

SEQ ID NO: 2123960 - DNA, 15 bp, Homo sapiens
ctgaggcatgagaat

SEQ ID NO: 2123961 - DNA, 15 bp, Homo sapiens
tgaggcatgagaatt

SEQ ID NO: 2123962 - DNA, 15 bp, Homo sapiens
gaggcatgagaattg

SEQ ID NO: 2123963 - DNA, 15 bp, Homo sapiens
aggcatgagaattgc

SEQ ID NO: 2123964 - DNA, 15 bp, Homo sapiens
ggcatgagaattgct

SEQ ID NO: 2123965 - DNA, 15 bp, Homo sapiens
gcatgagaattgctt

SEQ ID NO: 2123966 - DNA, 15 bp, Homo sapiens
catgagaattgcttg

SEQ ID NO: 2123967 - DNA, 15 bp, Homo sapiens
atgagaattgcttga

SEQ ID NO: 2123968 - DNA, 15 bp, Homo sapiens
tgagaattgcttgaa

SEQ ID NO: 2123969 - DNA, 15 bp, Homo sapiens
attgcttgaacccaa

SEQ ID NO: 2123970 - DNA, 15 bp, Homo sapiens
ttgcttgaacccaag

SEQ ID NO: 2123971 - DNA, 15 bp, Homo sapiens
tgcttgaacccaaga

SEQ ID NO: 2123972 - DNA, 15 bp, Homo sapiens
gcttgaacccaagaa

SEQ ID NO: 2123973 - DNA, 15 bp, Homo sapiens
cttgaacccaagaag

SEQ ID NO: 2123974 - DNA, 15 bp, Homo sapiens
ttgaacccaagaagt

SEQ ID NO: 2123975 - DNA, 15 bp, Homo sapiens
tgaacccaagaagtg

SEQ ID NO: 2123976 - DNA, 15 bp, Homo sapiens
gaacccaagaagtgg

SEQ ID NO: 2123977 - DNA, 15 bp, Homo sapiens
aacccaagaagtgga

SEQ ID NO: 2123978 - DNA, 15 bp, Homo sapiens
acccaagaagtggag

SEQ ID NO: 2123979 - DNA, 15 bp, Homo sapiens
cccaagaagtggagg

SEQ ID NO: 2123980 - DNA, 15 bp, Homo sapiens
ccaagaagtggaggt

SEQ ID NO: 2123981 - DNA, 15 bp, Homo sapiens
caagaagtggaggtt

SEQ ID NO: 2123982 - DNA, 15 bp, Homo sapiens
aagaagtggaggttg

SEQ ID NO: 2123983 - DNA, 15 bp, Homo sapiens
agaagtggaggttgc

SEQ ID NO: 2123984 - DNA, 15 bp, Homo sapiens
gttgcagtgaaccgt

SEQ ID NO: 2123985 - DNA, 15 bp, Homo sapiens
ttgcagtgaaccgtg

SEQ ID NO: 2123986 - DNA, 15 bp, Homo sapiens
tgcagtgaaccgtga

SEQ ID NO: 2123987 - DNA, 15 bp, Homo sapiens
gcagtgaaccgtgat

SEQ ID NO: 2123988 - DNA, 15 bp, Homo sapiens
cagtgaaccgtgatc

SEQ ID NO: 2123989 - DNA, 15 bp, Homo sapiens
agtgaaccgtgatca

SEQ ID NO: 2123990 - DNA, 15 bp, Homo sapiens
gtgaaccgtgatcac

SEQ ID NO: 2123991 - DNA, 15 bp, Homo sapiens
tgaaccgtgatcaca

SEQ ID NO: 2123992 - DNA, 15 bp, Homo sapiens
gaaccgtgatcacac

SEQ ID NO: 2123993 - DNA, 15 bp, Homo sapiens
aaccgtgatcacacc

SEQ ID NO: 2123994 - DNA, 15 bp, Homo sapiens
accgtgatcacacca

SEQ ID NO: 2123995 - DNA, 15 bp, Homo sapiens
ccgtgatcacaccac

SEQ ID NO: 2123996 - DNA, 15 bp, Homo sapiens
cgtgatcacaccact

SEQ ID NO: 2123997 - DNA, 15 bp, Homo sapiens
cactccagccttggc

SEQ ID NO: 2123998 - DNA, 15 bp, Homo sapiens
actccagccttggcg

SEQ ID NO: 2123999 - DNA, 15 bp, Homo sapiens
ctccagccttggcga

SEQ ID NO: 2124000 - DNA, 15 bp, Homo sapiens
tccagccttggcgac

SEQ ID NO: 2124001 - DNA, 15 bp, Homo sapiens
ccagccttggcgaca

SEQ ID NO: 2124002 - DNA, 15 bp, Homo sapiens
cagccttggcgacag

SEQ ID NO: 2124003 - DNA, 15 bp, Homo sapiens
agccttggcgacaga

SEQ ID NO: 2124004 - DNA, 15 bp, Homo sapiens
gccttggcgacagag

SEQ ID NO: 2124005 - DNA, 15 bp, Homo sapiens
ccttggcgacagaga

SEQ ID NO: 2124006 - DNA, 15 bp, Homo sapiens
cttggcgacagagag

SEQ ID NO: 2124007 - DNA, 15 bp, Homo sapiens
ttggcgacagagaga

SEQ ID NO: 2124008 - DNA, 15 bp, Homo sapiens
tggcgacagagagag

SEQ ID NO: 2124009 - DNA, 15 bp, Homo sapiens
ggcgacagagagaga

SEQ ID NO: 2124010 - DNA, 15 bp, Homo sapiens
gcgacagagagagat

SEQ ID NO: 2124011 - DNA, 15 bp, Homo sapiens
cgacagagagagatt

SEQ ID NO: 2124012 - DNA, 15 bp, Homo sapiens
gacagagagagattc

SEQ ID NO: 2124013 - DNA, 15 bp, Homo sapiens
acagagagagattct

SEQ ID NO: 2124014 - DNA, 15 bp, Homo sapiens
cagagagagattctg

SEQ ID NO: 2124015 - DNA, 15 bp, Homo sapiens
agagagagattctgt

SEQ ID NO: 2124016 - DNA, 15 bp, Homo sapiens
gagagagattctgtc

SEQ ID NO: 2124017 - DNA, 15 bp, Homo sapiens
agagagattctgtct

SEQ ID NO: 2124018 - DNA, 15 bp, Homo sapiens
gagagattctgtctc

SEQ ID NO: 2124019 - DNA, 15 bp, Homo sapiens
agagattctgtctca

SEQ ID NO: 2124020 - DNA, 15 bp, Homo sapiens
gagattctgtctcaa

SEQ ID NO: 2124021 - DNA, 15 bp, Homo sapiens
agattctgtctcaaa

SEQ ID NO: 2124022 - DNA, 15 bp, Homo sapiens
gattctgtctcaaaa

SEQ ID NO: 2124023 - DNA, 15 bp, Homo sapiens
attctgtctcaaaaa

SEQ ID NO: 2124024 - DNA, 15 bp, Homo sapiens
ttctgtctcaaaaaa

SEQ ID NO: 2124025 - DNA, 15 bp, Homo sapiens
ctgtctcaaaaaaat

SEQ ID NO: 2124026 - DNA, 15 bp, Homo sapiens
tgtctcaaaaaaata

SEQ ID NO: 2124027 - DNA, 15 bp, Homo sapiens
gtctcaaaaaaataa

SEQ ID NO: 2124028 - DNA, 15 bp, Homo sapiens
aaaaaaataaaaatt

SEQ ID NO: 2124029 - DNA, 15 bp, Homo sapiens
aaaaaataaaaatta

SEQ ID NO: 2124030 - DNA, 15 bp, Homo sapiens
aaaaataaaaattaa

SEQ ID NO: 2124031 - DNA, 15 bp, Homo sapiens
ataaaaattaaaaaa

SEQ ID NO: 2124032 - DNA, 15 bp, Homo sapiens
taaaaattaaaaaaa

SEQ ID NO: 2124033 - DNA, 15 bp, Homo sapiens
aaaaattaaaaaaaa

SEQ ID NO: 2124034 - DNA, 15 bp, Homo sapiens
aaaattaaaaaaaaa

SEQ ID NO: 2124035 - DNA, 15 bp, Homo sapiens
aaattaaaaaaaaaa

SEQ ID NO: 2124036 - DNA, 15 bp, Homo sapiens
ttaaaaaaaaaaaag

SEQ ID NO: 2124037 - DNA, 15 bp, Homo sapiens
taaaaaaaaaaaaga

SEQ ID NO: 2124038 - DNA, 15 bp, Homo sapiens
gaaagaaagaaaaaa

SEQ ID NO: 2124039 - DNA, 15 bp, Homo sapiens
gaaagaaaaaaaaaa

SEQ ID NO: 2124040 - DNA, 15 bp, Homo sapiens
aaaaaaaagaaaaat

SEQ ID NO: 2124041 - DNA, 15 bp, Homo sapiens
aaaaaagaaaaatgc

SEQ ID NO: 2124042 - DNA, 15 bp, Homo sapiens
aaaaagaaaaatgca

SEQ ID NO: 2124043 - DNA, 15 bp, Homo sapiens
aaaagaaaaatgcaa

SEQ ID NO: 2124044 - DNA, 15 bp, Homo sapiens
aaagaaaaatgcaaa

SEQ ID NO: 2124045 - DNA, 15 bp, Homo sapiens
aagaaaaatgcaaat

SEQ ID NO: 2124046 - DNA, 15 bp, Homo sapiens
agaaaaatgcaaatc

SEQ ID NO: 2124047 - DNA, 15 bp, Homo sapiens
gaaaaatgcaaatca

SEQ ID NO: 2124048 - DNA, 15 bp, Homo sapiens
aaaaatgcaaatcaa

SEQ ID NO: 2124049 - DNA, 15 bp, Homo sapiens
tcaaaaccacaatgc

SEQ ID NO: 2124050 - DNA, 15 bp, Homo sapiens
caaaaccacaatgca

SEQ ID NO: 2124051 - DNA, 15 bp, Homo sapiens
aaaaccacaatgcaa

SEQ ID NO: 2124052 - DNA, 15 bp, Homo sapiens
aaaccacaatgcaat

SEQ ID NO: 2124053 - DNA, 15 bp, Homo sapiens
aaccacaatgcaata

SEQ ID NO: 2124054 - DNA, 15 bp, Homo sapiens
accacaatgcaatat

SEQ ID NO: 2124055 - DNA, 15 bp, Homo sapiens
ccacaatgcaatatt

SEQ ID NO: 2124056 - DNA, 15 bp, Homo sapiens
cacaatgcaatattg

SEQ ID NO: 2124057 - DNA, 15 bp, Homo sapiens
acaatgcaatattgc

SEQ ID NO: 2124058 - DNA, 15 bp, Homo sapiens
caatgcaatattgcc

SEQ ID NO: 2124059 - DNA, 15 bp, Homo sapiens
aatgcaatattgcct

SEQ ID NO: 2124060 - DNA, 15 bp, Homo sapiens
atgcaatattgcctc

SEQ ID NO: 2124061 - DNA, 15 bp, Homo sapiens
tgcaatattgcctca

SEQ ID NO: 2124062 - DNA, 15 bp, Homo sapiens
gcaatattgcctcac

SEQ ID NO: 2124063 - DNA, 15 bp, Homo sapiens
caatattgcctcaca

SEQ ID NO: 2124064 - DNA, 15 bp, Homo sapiens
aatattgcctcacac

SEQ ID NO: 2124065 - DNA, 15 bp, Homo sapiens
atattgcctcacacc

SEQ ID NO: 2124066 - DNA, 15 bp, Homo sapiens
tattgcctcacacct

SEQ ID NO: 2124067 - DNA, 15 bp, Homo sapiens
attgcctcacacctg

SEQ ID NO: 2124068 - DNA, 15 bp, Homo sapiens
ttgcctcacacctgt

SEQ ID NO: 2124069 - DNA, 15 bp, Homo sapiens
gcctcacacctgtta

SEQ ID NO: 2124070 - DNA, 15 bp, Homo sapiens
cctcacacctgttag

SEQ ID NO: 2124071 - DNA, 15 bp, Homo sapiens
ctcacacctgttaga

SEQ ID NO: 2124072 - DNA, 15 bp, Homo sapiens
tcacacctgttagaa

SEQ ID NO: 2124073 - DNA, 15 bp, Homo sapiens
cacacctgttagaat

SEQ ID NO: 2124074 - DNA, 15 bp, Homo sapiens
acacctgttagaatg

SEQ ID NO: 2124075 - DNA, 15 bp, Homo sapiens
cacctgttagaatgg

SEQ ID NO: 2124076 - DNA, 15 bp, Homo sapiens
acctgttagaatggc

SEQ ID NO: 2124077 - DNA, 15 bp, Homo sapiens
cctgttagaatggct

SEQ ID NO: 2124078 - DNA, 15 bp, Homo sapiens
ctgttagaatggcta

SEQ ID NO: 2124079 - DNA, 15 bp, Homo sapiens
tgttagaatggctat

SEQ ID NO: 2124080 - DNA, 15 bp, Homo sapiens
gttagaatggctatt

SEQ ID NO: 2124081 - DNA, 15 bp, Homo sapiens
ttagaatggctattt

SEQ ID NO: 2124082 - DNA, 15 bp, Homo sapiens
tagaatggctatttt

SEQ ID NO: 2124083 - DNA, 15 bp, Homo sapiens
agaatggctattttc

SEQ ID NO: 2124084 - DNA, 15 bp, Homo sapiens
gaatggctattttca

SEQ ID NO: 2124085 - DNA, 15 bp, Homo sapiens
aatggctattttcaa

SEQ ID NO: 2124086 - DNA, 15 bp, Homo sapiens
atggctattttcaag

SEQ ID NO: 2124087 - DNA, 15 bp, Homo sapiens
tggctattttcaaga

SEQ ID NO: 2124088 - DNA, 15 bp, Homo sapiens
ggctattttcaagaa

SEQ ID NO: 2124089 - DNA, 15 bp, Homo sapiens
gctattttcaagaag

SEQ ID NO: 2124090 - DNA, 15 bp, Homo sapiens
ctattttcaagaaga

SEQ ID NO: 2124091 - DNA, 15 bp, Homo sapiens
tattttcaagaagac

SEQ ID NO: 2124092 - DNA, 15 bp, Homo sapiens
attttcaagaagaca

SEQ ID NO: 2124093 - DNA, 15 bp, Homo sapiens
ttttcaagaagacaa

SEQ ID NO: 2124094 - DNA, 15 bp, Homo sapiens
tttcaagaagacaaa

SEQ ID NO: 2124095 - DNA, 15 bp, Homo sapiens
ttcaagaagacaaaa

SEQ ID NO: 2124096 - DNA, 15 bp, Homo sapiens
tcaagaagacaaaag

SEQ ID NO: 2124097 - DNA, 15 bp, Homo sapiens
caagaagacaaaagt

SEQ ID NO: 2124098 - DNA, 15 bp, Homo sapiens
aagaagacaaaagtt

SEQ ID NO: 2124099 - DNA, 15 bp, Homo sapiens
agaagacaaaagtta

SEQ ID NO: 2124100 - DNA, 15 bp, Homo sapiens
gaagacaaaagttaa

SEQ ID NO: 2124101 - DNA, 15 bp, Homo sapiens
aagacaaaagttaag

SEQ ID NO: 2124102 - DNA, 15 bp, Homo sapiens
agacaaaagttaagg

SEQ ID NO: 2124103 - DNA, 15 bp, Homo sapiens
gacaaaagttaagga

SEQ ID NO: 2124104 - DNA, 15 bp, Homo sapiens
acaaaagttaaggat

SEQ ID NO: 2124105 - DNA, 15 bp, Homo sapiens
caaaagttaaggatt

SEQ ID NO: 2124106 - DNA, 15 bp, Homo sapiens
aaaagttaaggattg

SEQ ID NO: 2124107 - DNA, 15 bp, Homo sapiens
aaagttaaggattgg

SEQ ID NO: 2124108 - DNA, 15 bp, Homo sapiens
aagttaaggattggt

SEQ ID NO: 2124109 - DNA, 15 bp, Homo sapiens
agttaaggattggtg

SEQ ID NO: 2124110 - DNA, 15 bp, Homo sapiens
gttaaggattggtga

SEQ ID NO: 2124111 - DNA, 15 bp, Homo sapiens
ttaaggattggtgag

SEQ ID NO: 2124112 - DNA, 15 bp, Homo sapiens
taaggattggtgagg

SEQ ID NO: 2124113 - DNA, 15 bp, Homo sapiens
aaggattggtgaggg

SEQ ID NO: 2124114 - DNA, 15 bp, Homo sapiens
aggattggtgagggt

SEQ ID NO: 2124115 - DNA, 15 bp, Homo sapiens
ggattggtgagggtg

SEQ ID NO: 2124116 - DNA, 15 bp, Homo sapiens
gattggtgagggtgt

SEQ ID NO: 2124117 - DNA, 15 bp, Homo sapiens
attggtgagggtgtg

SEQ ID NO: 2124118 - DNA, 15 bp, Homo sapiens
ttggtgagggtgtgg

SEQ ID NO: 2124119 - DNA, 15 bp, Homo sapiens
tggtgagggtgtgga

SEQ ID NO: 2124120 - DNA, 15 bp, Homo sapiens
ggtgagggtgtggag

SEQ ID NO: 2124121 - DNA, 15 bp, Homo sapiens
gtgagggtgtggaga

SEQ ID NO: 2124122 - DNA, 15 bp, Homo sapiens
tgagggtgtggagaa

SEQ ID NO: 2124123 - DNA, 15 bp, Homo sapiens
gagggtgtggagaaa

SEQ ID NO: 2124124 - DNA, 15 bp, Homo sapiens
agggtgtggagaaaa

SEQ ID NO: 2124125 - DNA, 15 bp, Homo sapiens
gggtgtggagaaaag

SEQ ID NO: 2124126 - DNA, 15 bp, Homo sapiens
ggtgtggagaaaagg

SEQ ID NO: 2124127 - DNA, 15 bp, Homo sapiens
gtgtggagaaaaggg

SEQ ID NO: 2124128 - DNA, 15 bp, Homo sapiens
ggagaaaagggaaca

SEQ ID NO: 2124129 - DNA, 15 bp, Homo sapiens
gagaaaagggaacat

SEQ ID NO: 2124130 - DNA, 15 bp, Homo sapiens
agaaaagggaacatt

SEQ ID NO: 2124131 - DNA, 15 bp, Homo sapiens
gaaaagggaacattt

SEQ ID NO: 2124132 - DNA, 15 bp, Homo sapiens
aaaagggaacattta

SEQ ID NO: 2124133 - DNA, 15 bp, Homo sapiens
aaagggaacatttat

SEQ ID NO: 2124134 - DNA, 15 bp, Homo sapiens
aagggaacatttata

SEQ ID NO: 2124135 - DNA, 15 bp, Homo sapiens
agggaacatttatac

SEQ ID NO: 2124136 - DNA, 15 bp, Homo sapiens
gggaacatttataca

SEQ ID NO: 2124137 - DNA, 15 bp, Homo sapiens
ggaacatttatacag

SEQ ID NO: 2124138 - DNA, 15 bp, Homo sapiens
gaacatttatacagt

SEQ ID NO: 2124139 - DNA, 15 bp, Homo sapiens
aacatttatacagtg

SEQ ID NO: 2124140 - DNA, 15 bp, Homo sapiens
acatttatacagtgt

SEQ ID NO: 2124141 - DNA, 15 bp, Homo sapiens
catttatacagtgtt

SEQ ID NO: 2124142 - DNA, 15 bp, Homo sapiens
atttatacagtgttg

SEQ ID NO: 2124143 - DNA, 15 bp, Homo sapiens
tttatacagtgttgg

SEQ ID NO: 2124144 - DNA, 15 bp, Homo sapiens
ttatacagtgttggt

SEQ ID NO: 2124145 - DNA, 15 bp, Homo sapiens
tatacagtgttggtg

SEQ ID NO: 2124146 - DNA, 15 bp, Homo sapiens
atacagtgttggtgg

SEQ ID NO: 2124147 - DNA, 15 bp, Homo sapiens
tacagtgttggtgga

SEQ ID NO: 2124148 - DNA, 15 bp, Homo sapiens
acagtgttggtggaa

SEQ ID NO: 2124149 - DNA, 15 bp, Homo sapiens
cagtgttggtggaaa

SEQ ID NO: 2124150 - DNA, 15 bp, Homo sapiens
agtgttggtggaaat

SEQ ID NO: 2124151 - DNA, 15 bp, Homo sapiens
gtgttggtggaaata

SEQ ID NO: 2124152 - DNA, 15 bp, Homo sapiens
ggaaatataaattag

SEQ ID NO: 2124153 - DNA, 15 bp, Homo sapiens
gaaatataaattagt

SEQ ID NO: 2124154 - DNA, 15 bp, Homo sapiens
aaatataaattagtt

SEQ ID NO: 2124155 - DNA, 15 bp, Homo sapiens
aatataaattagttc

SEQ ID NO: 2124156 - DNA, 15 bp, Homo sapiens
atataaattagttca

SEQ ID NO: 2124157 - DNA, 15 bp, Homo sapiens
tataaattagttcaa

SEQ ID NO: 2124158 - DNA, 15 bp, Homo sapiens
ataaattagttcaac

SEQ ID NO: 2124159 - DNA, 15 bp, Homo sapiens
taaattagttcaacc

SEQ ID NO: 2124160 - DNA, 15 bp, Homo sapiens
aaattagttcaacca

SEQ ID NO: 2124161 - DNA, 15 bp, Homo sapiens
aattagttcaaccat

SEQ ID NO: 2124162 - DNA, 15 bp, Homo sapiens
attagttcaaccatc

SEQ ID NO: 2124163 - DNA, 15 bp, Homo sapiens
ttagttcaaccatca

SEQ ID NO: 2124164 - DNA, 15 bp, Homo sapiens
tagttcaaccatcat

SEQ ID NO: 2124165 - DNA, 15 bp, Homo sapiens
agttcaaccatcatg

SEQ ID NO: 2124166 - DNA, 15 bp, Homo sapiens
gttcaaccatcatgg

SEQ ID NO: 2124167 - DNA, 15 bp, Homo sapiens
ttcaaccatcatgga

SEQ ID NO: 2124168 - DNA, 15 bp, Homo sapiens
tcaaccatcatggag

SEQ ID NO: 2124169 - DNA, 15 bp, Homo sapiens
caaccatcatggagg

SEQ ID NO: 2124170 - DNA, 15 bp, Homo sapiens
aaccatcatggaggc

SEQ ID NO: 2124171 - DNA, 15 bp, Homo sapiens
accatcatggaggct

SEQ ID NO: 2124172 - DNA, 15 bp, Homo sapiens
ccatcatggaggctt

SEQ ID NO: 2124173 - DNA, 15 bp, Homo sapiens
catcatggaggcttc

SEQ ID NO: 2124174 - DNA, 15 bp, Homo sapiens
atcatggaggcttct

SEQ ID NO: 2124175 - DNA, 15 bp, Homo sapiens
tcatggaggcttctg

SEQ ID NO: 2124176 - DNA, 15 bp, Homo sapiens
catggaggcttctga

SEQ ID NO: 2124177 - DNA, 15 bp, Homo sapiens
atggaggcttctgaa

SEQ ID NO: 2124178 - DNA, 15 bp, Homo sapiens
tggaggcttctgaaa

SEQ ID NO: 2124179 - DNA, 15 bp, Homo sapiens
ggaggcttctgaaaa

SEQ ID NO: 2124180 - DNA, 15 bp, Homo sapiens
gaggcttctgaaaac

SEQ ID NO: 2124181 - DNA, 15 bp, Homo sapiens
aggcttctgaaaaca

SEQ ID NO: 2124182 - DNA, 15 bp, Homo sapiens
ggcttctgaaaacac

SEQ ID NO: 2124183 - DNA, 15 bp, Homo sapiens
gcttctgaaaacact

SEQ ID NO: 2124184 - DNA, 15 bp, Homo sapiens
cttctgaaaacacta

SEQ ID NO: 2124185 - DNA, 15 bp, Homo sapiens
ttctgaaaacactaa

SEQ ID NO: 2124186 - DNA, 15 bp, Homo sapiens
tctgaaaacactaaa

SEQ ID NO: 2124187 - DNA, 15 bp, Homo sapiens
ctgaaaacactaaaa

SEQ ID NO: 2124188 - DNA, 15 bp, Homo sapiens
tgaaaacactaaaaa

SEQ ID NO: 2124189 - DNA, 15 bp, Homo sapiens
gaaaacactaaaaat

SEQ ID NO: 2124190 - DNA, 15 bp, Homo sapiens
aaaacactaaaaata

SEQ ID NO: 2124191 - DNA, 15 bp, Homo sapiens
aaacactaaaaatac

SEQ ID NO: 2124192 - DNA, 15 bp, Homo sapiens
aacactaaaaataca

SEQ ID NO: 2124193 - DNA, 15 bp, Homo sapiens
acactaaaaatacaa

SEQ ID NO: 2124194 - DNA, 15 bp, Homo sapiens
cactaaaaatacaac

SEQ ID NO: 2124195 - DNA, 15 bp, Homo sapiens
actaaaaatacaact

SEQ ID NO: 2124196 - DNA, 15 bp, Homo sapiens
ctaaaaatacaacta

SEQ ID NO: 2124197 - DNA, 15 bp, Homo sapiens
taaaaatacaactac

SEQ ID NO: 2124198 - DNA, 15 bp, Homo sapiens
aaaaatacaactacc

SEQ ID NO: 2124199 - DNA, 15 bp, Homo sapiens
aaaatacaactacct

SEQ ID NO: 2124200 - DNA, 15 bp, Homo sapiens
aaatacaactacctt

SEQ ID NO: 2124201 - DNA, 15 bp, Homo sapiens
aatacaactacctta

SEQ ID NO: 2124202 - DNA, 15 bp, Homo sapiens
atacaactaccttat

SEQ ID NO: 2124203 - DNA, 15 bp, Homo sapiens
tacaactaccttatg

SEQ ID NO: 2124204 - DNA, 15 bp, Homo sapiens
acaactaccttatga

SEQ ID NO: 2124205 - DNA, 15 bp, Homo sapiens
caactaccttatgat

SEQ ID NO: 2124206 - DNA, 15 bp, Homo sapiens
aactaccttatgatc

SEQ ID NO: 2124207 - DNA, 15 bp, Homo sapiens
actaccttatgatcc

SEQ ID NO: 2124208 - DNA, 15 bp, Homo sapiens
ctaccttatgatcca

SEQ ID NO: 2124209 - DNA, 15 bp, Homo sapiens
taccttatgatccaa

SEQ ID NO: 2124210 - DNA, 15 bp, Homo sapiens
accttatgatccaat

SEQ ID NO: 2124211 - DNA, 15 bp, Homo sapiens
ccttatgatccaata

SEQ ID NO: 2124212 - DNA, 15 bp, Homo sapiens
cttatgatccaataa

SEQ ID NO: 2124213 - DNA, 15 bp, Homo sapiens
ttatgatccaataat

SEQ ID NO: 2124214 - DNA, 15 bp, Homo sapiens
tatgatccaataatc

SEQ ID NO: 2124215 - DNA, 15 bp, Homo sapiens
atgatccaataatcc

SEQ ID NO: 2124216 - DNA, 15 bp, Homo sapiens
tgatccaataatccc

SEQ ID NO: 2124217 - DNA, 15 bp, Homo sapiens
gatccaataatccca

SEQ ID NO: 2124218 - DNA, 15 bp, Homo sapiens
atccaataatcccac

SEQ ID NO: 2124219 - DNA, 15 bp, Homo sapiens
tccaataatcccact

SEQ ID NO: 2124220 - DNA, 15 bp, Homo sapiens
ccaataatcccactt

SEQ ID NO: 2124221 - DNA, 15 bp, Homo sapiens
caataatcccacttg

SEQ ID NO: 2124222 - DNA, 15 bp, Homo sapiens
aataatcccacttgt

SEQ ID NO: 2124223 - DNA, 15 bp, Homo sapiens
ataatcccacttgtg

SEQ ID NO: 2124224 - DNA, 15 bp, Homo sapiens
taatcccacttgtgg

SEQ ID NO: 2124225 - DNA, 15 bp, Homo sapiens
aatcccacttgtggg

SEQ ID NO: 2124226 - DNA, 15 bp, Homo sapiens
atcccacttgtgggt

SEQ ID NO: 2124227 - DNA, 15 bp, Homo sapiens
tcccacttgtgggtg

SEQ ID NO: 2124228 - DNA, 15 bp, Homo sapiens
cccacttgtgggtgt

SEQ ID NO: 2124229 - DNA, 15 bp, Homo sapiens
ccacttgtgggtgtt

SEQ ID NO: 2124230 - DNA, 15 bp, Homo sapiens
cacttgtgggtgttg

SEQ ID NO: 2124231 - DNA, 15 bp, Homo sapiens
acttgtgggtgttgt

SEQ ID NO: 2124232 - DNA, 15 bp, Homo sapiens
cttgtgggtgttgtt

SEQ ID NO: 2124233 - DNA, 15 bp, Homo sapiens
ttgtgggtgttgttc

SEQ ID NO: 2124234 - DNA, 15 bp, Homo sapiens
tgtgggtgttgttca

SEQ ID NO: 2124235 - DNA, 15 bp, Homo sapiens
gtgggtgttgttcaa

SEQ ID NO: 2124236 - DNA, 15 bp, Homo sapiens
tgggtgttgttcaaa

SEQ ID NO: 2124237 - DNA, 15 bp, Homo sapiens
gggtgttgttcaaag

SEQ ID NO: 2124238 - DNA, 15 bp, Homo sapiens
ggtgttgttcaaaga

SEQ ID NO: 2124239 - DNA, 15 bp, Homo sapiens
gtgttgttcaaagaa

SEQ ID NO: 2124240 - DNA, 15 bp, Homo sapiens
tgttgttcaaagaaa

SEQ ID NO: 2124241 - DNA, 15 bp, Homo sapiens
gttgttcaaagaaat

SEQ ID NO: 2124242 - DNA, 15 bp, Homo sapiens
ttgttcaaagaaatt

SEQ ID NO: 2124243 - DNA, 15 bp, Homo sapiens
tgttcaaagaaattg

SEQ ID NO: 2124244 - DNA, 15 bp, Homo sapiens
gttcaaagaaattga

SEQ ID NO: 2124245 - DNA, 15 bp, Homo sapiens
ttcaaagaaattgaa

SEQ ID NO: 2124246 - DNA, 15 bp, Homo sapiens
tcaaagaaattgaaa

SEQ ID NO: 2124247 - DNA, 15 bp, Homo sapiens
caaagaaattgaaat

SEQ ID NO: 2124248 - DNA, 15 bp, Homo sapiens
aaagaaattgaaatc

SEQ ID NO: 2124249 - DNA, 15 bp, Homo sapiens
aagaaattgaaatca

SEQ ID NO: 2124250 - DNA, 15 bp, Homo sapiens
agaaattgaaatcag

SEQ ID NO: 2124251 - DNA, 15 bp, Homo sapiens
gaaattgaaatcagt

SEQ ID NO: 2124252 - DNA, 15 bp, Homo sapiens
aaattgaaatcagtg

SEQ ID NO: 2124253 - DNA, 15 bp, Homo sapiens
aattgaaatcagtgt

SEQ ID NO: 2124254 - DNA, 15 bp, Homo sapiens
attgaaatcagtgtg

SEQ ID NO: 2124255 - DNA, 15 bp, Homo sapiens
ttgaaatcagtgtgt

SEQ ID NO: 2124256 - DNA, 15 bp, Homo sapiens
tgaaatcagtgtgtt

SEQ ID NO: 2124257 - DNA, 15 bp, Homo sapiens
gaaatcagtgtgttg

SEQ ID NO: 2124258 - DNA, 15 bp, Homo sapiens
aaatcagtgtgttga

SEQ ID NO: 2124259 - DNA, 15 bp, Homo sapiens
aatcagtgtgttgaa

SEQ ID NO: 2124260 - DNA, 15 bp, Homo sapiens
atcagtgtgttgaag

SEQ ID NO: 2124261 - DNA, 15 bp, Homo sapiens
tcagtgtgttgaaga

SEQ ID NO: 2124262 - DNA, 15 bp, Homo sapiens
cagtgtgttgaagag

SEQ ID NO: 2124263 - DNA, 15 bp, Homo sapiens
agtgtgttgaagaga

SEQ ID NO: 2124264 - DNA, 15 bp, Homo sapiens
gtgtgttgaagagac

SEQ ID NO: 2124265 - DNA, 15 bp, Homo sapiens
tgtgttgaagagaca

SEQ ID NO: 2124266 - DNA, 15 bp, Homo sapiens
gtgttgaagagacat

SEQ ID NO: 2124267 - DNA, 15 bp, Homo sapiens
tgttgaagagacatt

SEQ ID NO: 2124268 - DNA, 15 bp, Homo sapiens
gttgaagagacattt

SEQ ID NO: 2124269 - DNA, 15 bp, Homo sapiens
ttgaagagacatttg

SEQ ID NO: 2124270 - DNA, 15 bp, Homo sapiens
tgaagagacatttgt

SEQ ID NO: 2124271 - DNA, 15 bp, Homo sapiens
gaagagacatttgtc

SEQ ID NO: 2124272 - DNA, 15 bp, Homo sapiens
aagagacatttgtcc

SEQ ID NO: 2124273 - DNA, 15 bp, Homo sapiens
agagacatttgtcct

SEQ ID NO: 2124274 - DNA, 15 bp, Homo sapiens
gagacatttgtcctc

SEQ ID NO: 2124275 - DNA, 15 bp, Homo sapiens
agacatttgtcctcc

SEQ ID NO: 2124276 - DNA, 15 bp, Homo sapiens
gacatttgtcctcct

SEQ ID NO: 2124277 - DNA, 15 bp, Homo sapiens
acatttgtcctccta

SEQ ID NO: 2124278 - DNA, 15 bp, Homo sapiens
catttgtcctcctat

SEQ ID NO: 2124279 - DNA, 15 bp, Homo sapiens
atttgtcctcctatg

SEQ ID NO: 2124280 - DNA, 15 bp, Homo sapiens
tttgtcctcctatgt

SEQ ID NO: 2124281 - DNA, 15 bp, Homo sapiens
ttgtcctcctatgtt

SEQ ID NO: 2124282 - DNA, 15 bp, Homo sapiens
tgtcctcctatgttt

SEQ ID NO: 2124283 - DNA, 15 bp, Homo sapiens
gtcctcctatgttta

SEQ ID NO: 2124284 - DNA, 15 bp, Homo sapiens
tcctcctatgtttat

SEQ ID NO: 2124285 - DNA, 15 bp, Homo sapiens
cctcctatgtttatt

SEQ ID NO: 2124286 - DNA, 15 bp, Homo sapiens
ctcctatgtttatta

SEQ ID NO: 2124287 - DNA, 15 bp, Homo sapiens
tcctatgtttattat

SEQ ID NO: 2124288 - DNA, 15 bp, Homo sapiens
cctatgtttattata

SEQ ID NO: 2124289 - DNA, 15 bp, Homo sapiens
ctatgtttattatag

SEQ ID NO: 2124290 - DNA, 15 bp, Homo sapiens
tatgtttattatagc

SEQ ID NO: 2124291 - DNA, 15 bp, Homo sapiens
atgtttattatagca

SEQ ID NO: 2124292 - DNA, 15 bp, Homo sapiens
tgtttattatagcat

SEQ ID NO: 2124293 - DNA, 15 bp, Homo sapiens
gtttattatagcatt

SEQ ID NO: 2124294 - DNA, 15 bp, Homo sapiens
tttattatagcatta

SEQ ID NO: 2124295 - DNA, 15 bp, Homo sapiens
ttattatagcattat

SEQ ID NO: 2124296 - DNA, 15 bp, Homo sapiens
tattatagcattatt

SEQ ID NO: 2124297 - DNA, 15 bp, Homo sapiens
attatagcattattc

SEQ ID NO: 2124298 - DNA, 15 bp, Homo sapiens
ttatagcattattca

SEQ ID NO: 2124299 - DNA, 15 bp, Homo sapiens
tatagcattattcac

SEQ ID NO: 2124300 - DNA, 15 bp, Homo sapiens
atagcattattcaca

SEQ ID NO: 2124301 - DNA, 15 bp, Homo sapiens
tagcattattcacaa

SEQ ID NO: 2124302 - DNA, 15 bp, Homo sapiens
attattcacaatagt

SEQ ID NO: 2124303 - DNA, 15 bp, Homo sapiens
ttattcacaatagtc

SEQ ID NO: 2124304 - DNA, 15 bp, Homo sapiens
tattcacaatagtca

SEQ ID NO: 2124305 - DNA, 15 bp, Homo sapiens
attcacaatagtcaa

SEQ ID NO: 2124306 - DNA, 15 bp, Homo sapiens
ttcacaatagtcaag

SEQ ID NO: 2124307 - DNA, 15 bp, Homo sapiens
tcacaatagtcaaga

SEQ ID NO: 2124308 - DNA, 15 bp, Homo sapiens
cacaatagtcaagat

SEQ ID NO: 2124309 - DNA, 15 bp, Homo sapiens
acaatagtcaagata

SEQ ID NO: 2124310 - DNA, 15 bp, Homo sapiens
caatagtcaagatat

SEQ ID NO: 2124311 - DNA, 15 bp, Homo sapiens
aatagtcaagatatg

SEQ ID NO: 2124312 - DNA, 15 bp, Homo sapiens
atagtcaagatatga

SEQ ID NO: 2124313 - DNA, 15 bp, Homo sapiens
tagtcaagatatgaa

SEQ ID NO: 2124314 - DNA, 15 bp, Homo sapiens
agtcaagatatgaaa

SEQ ID NO: 2124315 - DNA, 15 bp, Homo sapiens
gtcaagatatgaaat

SEQ ID NO: 2124316 - DNA, 15 bp, Homo sapiens
tcaagatatgaaatc

SEQ ID NO: 2124317 - DNA, 15 bp, Homo sapiens
caagatatgaaatca

SEQ ID NO: 2124318 - DNA, 15 bp, Homo sapiens
aagatatgaaatcaa

SEQ ID NO: 2124319 - DNA, 15 bp, Homo sapiens
agatatgaaatcaag

SEQ ID NO: 2124320 - DNA, 15 bp, Homo sapiens
gatatgaaatcaagg

SEQ ID NO: 2124321 - DNA, 15 bp, Homo sapiens
atatgaaatcaaggt

SEQ ID NO: 2124322 - DNA, 15 bp, Homo sapiens
tatgaaatcaaggta

SEQ ID NO: 2124323 - DNA, 15 bp, Homo sapiens
atgaaatcaaggtaa

SEQ ID NO: 2124324 - DNA, 15 bp, Homo sapiens
tgaaatcaaggtaag

SEQ ID NO: 2124325 - DNA, 15 bp, Homo sapiens
gaaatcaaggtaagt

SEQ ID NO: 2124326 - DNA, 15 bp, Homo sapiens
aaatcaaggtaagtc

SEQ ID NO: 2124327 - DNA, 15 bp, Homo sapiens
aatcaaggtaagtcc

SEQ ID NO: 2124328 - DNA, 15 bp, Homo sapiens
atcaaggtaagtccc

SEQ ID NO: 2124329 - DNA, 15 bp, Homo sapiens
tcaaggtaagtcccc

SEQ ID NO: 2124330 - DNA, 15 bp, Homo sapiens
caaggtaagtcccca

SEQ ID NO: 2124331 - DNA, 15 bp, Homo sapiens
aaggtaagtccccat

SEQ ID NO: 2124332 - DNA, 15 bp, Homo sapiens
aggtaagtccccatc

SEQ ID NO: 2124333 - DNA, 15 bp, Homo sapiens
ggtaagtccccatca

SEQ ID NO: 2124334 - DNA, 15 bp, Homo sapiens
gtaagtccccatcaa

SEQ ID NO: 2124335 - DNA, 15 bp, Homo sapiens
taagtccccatcaac

SEQ ID NO: 2124336 - DNA, 15 bp, Homo sapiens
aagtccccatcaaca

SEQ ID NO: 2124337 - DNA, 15 bp, Homo sapiens
agtccccatcaacag

SEQ ID NO: 2124338 - DNA, 15 bp, Homo sapiens
gtccccatcaacaga

SEQ ID NO: 2124339 - DNA, 15 bp, Homo sapiens
tccccatcaacagat

SEQ ID NO: 2124340 - DNA, 15 bp, Homo sapiens
ccccatcaacagatg

SEQ ID NO: 2124341 - DNA, 15 bp, Homo sapiens
cccatcaacagatga

SEQ ID NO: 2124342 - DNA, 15 bp, Homo sapiens
ccatcaacagatgaa

SEQ ID NO: 2124343 - DNA, 15 bp, Homo sapiens
catcaacagatgaat

SEQ ID NO: 2124344 - DNA, 15 bp, Homo sapiens
atcaacagatgaatg

SEQ ID NO: 2124345 - DNA, 15 bp, Homo sapiens
tcaacagatgaatgt

SEQ ID NO: 2124346 - DNA, 15 bp, Homo sapiens
caacagatgaatgta

SEQ ID NO: 2124347 - DNA, 15 bp, Homo sapiens
aacagatgaatgtat

SEQ ID NO: 2124348 - DNA, 15 bp, Homo sapiens
acagatgaatgtata

SEQ ID NO: 2124349 - DNA, 15 bp, Homo sapiens
cagatgaatgtataa

SEQ ID NO: 2124350 - DNA, 15 bp, Homo sapiens
agatgaatgtataaa

SEQ ID NO: 2124351 - DNA, 15 bp, Homo sapiens
gatgaatgtataaag

SEQ ID NO: 2124352 - DNA, 15 bp, Homo sapiens
atgaatgtataaaga

SEQ ID NO: 2124353 - DNA, 15 bp, Homo sapiens
tgaatgtataaagaa

SEQ ID NO: 2124354 - DNA, 15 bp, Homo sapiens
gaatgtataaagaaa

SEQ ID NO: 2124355 - DNA, 15 bp, Homo sapiens
aatgtataaagaaaa

SEQ ID NO: 2124356 - DNA, 15 bp, Homo sapiens
atgtataaagaaaat

SEQ ID NO: 2124357 - DNA, 15 bp, Homo sapiens
tgtataaagaaaatg

SEQ ID NO: 2124358 - DNA, 15 bp, Homo sapiens
gtataaagaaaatgt

SEQ ID NO: 2124359 - DNA, 15 bp, Homo sapiens
tataaagaaaatgtg

SEQ ID NO: 2124360 - DNA, 15 bp, Homo sapiens
ataaagaaaatgtgg

SEQ ID NO: 2124361 - DNA, 15 bp, Homo sapiens
aagaaaatgtggtat

SEQ ID NO: 2124362 - DNA, 15 bp, Homo sapiens
agaaaatgtggtata

SEQ ID NO: 2124363 - DNA, 15 bp, Homo sapiens
gaaaatgtggtatac

SEQ ID NO: 2124364 - DNA, 15 bp, Homo sapiens
aaaatgtggtataca

SEQ ID NO: 2124365 - DNA, 15 bp, Homo sapiens
aaatgtggtatacat

SEQ ID NO: 2124366 - DNA, 15 bp, Homo sapiens
aatgtggtatacata

SEQ ID NO: 2124367 - DNA, 15 bp, Homo sapiens
atgtggtatacatac

SEQ ID NO: 2124368 - DNA, 15 bp, Homo sapiens
tgtggtatacataca

SEQ ID NO: 2124369 - DNA, 15 bp, Homo sapiens
gtggtatacatacac

SEQ ID NO: 2124370 - DNA, 15 bp, Homo sapiens
tggtatacatacaca

SEQ ID NO: 2124371 - DNA, 15 bp, Homo sapiens
ggtatacatacacaa

SEQ ID NO: 2124372 - DNA, 15 bp, Homo sapiens
gtatacatacacaat

SEQ ID NO: 2124373 - DNA, 15 bp, Homo sapiens
tatacatacacaatg

SEQ ID NO: 2124374 - DNA, 15 bp, Homo sapiens
atacatacacaatgg

SEQ ID NO: 2124375 - DNA, 15 bp, Homo sapiens
tacatacacaatgga

SEQ ID NO: 2124376 - DNA, 15 bp, Homo sapiens
acatacacaatggaa

SEQ ID NO: 2124377 - DNA, 15 bp, Homo sapiens
catacacaatggaac

SEQ ID NO: 2124378 - DNA, 15 bp, Homo sapiens
atacacaatggaaca

SEQ ID NO: 2124379 - DNA, 15 bp, Homo sapiens
tacacaatggaacac

SEQ ID NO: 2124380 - DNA, 15 bp, Homo sapiens
acacaatggaacact

SEQ ID NO: 2124381 - DNA, 15 bp, Homo sapiens
cacaatggaacacta

SEQ ID NO: 2124382 - DNA, 15 bp, Homo sapiens
acaatggaacactag

SEQ ID NO: 2124383 - DNA, 15 bp, Homo sapiens
caatggaacactagt

SEQ ID NO: 2124384 - DNA, 15 bp, Homo sapiens
aatggaacactagtc

SEQ ID NO: 2124385 - DNA, 15 bp, Homo sapiens
atggaacactagtca

SEQ ID NO: 2124386 - DNA, 15 bp, Homo sapiens
tggaacactagtcag

SEQ ID NO: 2124387 - DNA, 15 bp, Homo sapiens
ggaacactagtcagc

SEQ ID NO: 2124388 - DNA, 15 bp, Homo sapiens
gaacactagtcagcc

SEQ ID NO: 2124389 - DNA, 15 bp, Homo sapiens
aacactagtcagcct

SEQ ID NO: 2124390 - DNA, 15 bp, Homo sapiens
acactagtcagcctt

SEQ ID NO: 2124391 - DNA, 15 bp, Homo sapiens
cactagtcagcctta

SEQ ID NO: 2124392 - DNA, 15 bp, Homo sapiens
actagtcagccttaa

SEQ ID NO: 2124393 - DNA, 15 bp, Homo sapiens
ctagtcagccttaaa

SEQ ID NO: 2124394 - DNA, 15 bp, Homo sapiens
tagtcagccttaaaa

SEQ ID NO: 2124395 - DNA, 15 bp, Homo sapiens
agtcagccttaaaaa

SEQ ID NO: 2124396 - DNA, 15 bp, Homo sapiens
gtcagccttaaaaag

SEQ ID NO: 2124397 - DNA, 15 bp, Homo sapiens
tcagccttaaaaaga

SEQ ID NO: 2124398 - DNA, 15 bp, Homo sapiens
cagccttaaaaagaa

SEQ ID NO: 2124399 - DNA, 15 bp, Homo sapiens
agccttaaaaagaag

SEQ ID NO: 2124400 - DNA, 15 bp, Homo sapiens
gccttaaaaagaagg

SEQ ID NO: 2124401 - DNA, 15 bp, Homo sapiens
ccttaaaaagaagga

SEQ ID NO: 2124402 - DNA, 15 bp, Homo sapiens
cttaaaaagaaggaa

SEQ ID NO: 2124403 - DNA, 15 bp, Homo sapiens
ttaaaaagaaggaaa

SEQ ID NO: 2124404 - DNA, 15 bp, Homo sapiens
taaaaagaaggaaaa

SEQ ID NO: 2124405 - DNA, 15 bp, Homo sapiens
aaaaagaaggaaaat

SEQ ID NO: 2124406 - DNA, 15 bp, Homo sapiens
aaaagaaggaaaatc

SEQ ID NO: 2124407 - DNA, 15 bp, Homo sapiens
aaagaaggaaaatct

SEQ ID NO: 2124408 - DNA, 15 bp, Homo sapiens
aagaaggaaaatctg

SEQ ID NO: 2124409 - DNA, 15 bp, Homo sapiens
agaaggaaaatctgt

SEQ ID NO: 2124410 - DNA, 15 bp, Homo sapiens
aaggaaaatctgtca

SEQ ID NO: 2124411 - DNA, 15 bp, Homo sapiens
aggaaaatctgtcat

SEQ ID NO: 2124412 - DNA, 15 bp, Homo sapiens
ggaaaatctgtcatt

SEQ ID NO: 2124413 - DNA, 15 bp, Homo sapiens
gaaaatctgtcattt

SEQ ID NO: 2124414 - DNA, 15 bp, Homo sapiens
aaaatctgtcatttg

SEQ ID NO: 2124415 - DNA, 15 bp, Homo sapiens
aaatctgtcatttgc

SEQ ID NO: 2124416 - DNA, 15 bp, Homo sapiens
aatctgtcatttgca

SEQ ID NO: 2124417 - DNA, 15 bp, Homo sapiens
atctgtcatttgcaa

SEQ ID NO: 2124418 - DNA, 15 bp, Homo sapiens
tctgtcatttgcaac

SEQ ID NO: 2124419 - DNA, 15 bp, Homo sapiens
ctgtcatttgcaaca

SEQ ID NO: 2124420 - DNA, 15 bp, Homo sapiens
tgtcatttgcaacaa

SEQ ID NO: 2124421 - DNA, 15 bp, Homo sapiens
gtcatttgcaacaac

SEQ ID NO: 2124422 - DNA, 15 bp, Homo sapiens
tcatttgcaacaaca

SEQ ID NO: 2124423 - DNA, 15 bp, Homo sapiens
catttgcaacaacat

SEQ ID NO: 2124424 - DNA, 15 bp, Homo sapiens
atttgcaacaacata

SEQ ID NO: 2124425 - DNA, 15 bp, Homo sapiens
tttgcaacaacatat

SEQ ID NO: 2124426 - DNA, 15 bp, Homo sapiens
ttgcaacaacatata

SEQ ID NO: 2124427 - DNA, 15 bp, Homo sapiens
tgcaacaacatatat

SEQ ID NO: 2124428 - DNA, 15 bp, Homo sapiens
gcaacaacatatatg

SEQ ID NO: 2124429 - DNA, 15 bp, Homo sapiens
caacaacatatatga

SEQ ID NO: 2124430 - DNA, 15 bp, Homo sapiens
aacaacatatatgaa

SEQ ID NO: 2124431 - DNA, 15 bp, Homo sapiens
acaacatatatgaac

SEQ ID NO: 2124432 - DNA, 15 bp, Homo sapiens
caacatatatgaacc

SEQ ID NO: 2124433 - DNA, 15 bp, Homo sapiens
aacatatatgaacct

SEQ ID NO: 2124434 - DNA, 15 bp, Homo sapiens
acatatatgaacctg

SEQ ID NO: 2124435 - DNA, 15 bp, Homo sapiens
catatatgaacctgg

SEQ ID NO: 2124436 - DNA, 15 bp, Homo sapiens
atatatgaacctgga

SEQ ID NO: 2124437 - DNA, 15 bp, Homo sapiens
tatatgaacctggag

SEQ ID NO: 2124438 - DNA, 15 bp, Homo sapiens
atatgaacctggagg

SEQ ID NO: 2124439 - DNA, 15 bp, Homo sapiens
tatgaacctggagga

SEQ ID NO: 2124440 - DNA, 15 bp, Homo sapiens
atgaacctggaggac

SEQ ID NO: 2124441 - DNA, 15 bp, Homo sapiens
tgaacctggaggaca

SEQ ID NO: 2124442 - DNA, 15 bp, Homo sapiens
gaacctggaggacat

SEQ ID NO: 2124443 - DNA, 15 bp, Homo sapiens
aacctggaggacatt

SEQ ID NO: 2124444 - DNA, 15 bp, Homo sapiens
acctggaggacatta

SEQ ID NO: 2124445 - DNA, 15 bp, Homo sapiens
cctggaggacattat

SEQ ID NO: 2124446 - DNA, 15 bp, Homo sapiens
ctggaggacattatg

SEQ ID NO: 2124447 - DNA, 15 bp, Homo sapiens
tggaggacattatgc

SEQ ID NO: 2124448 - DNA, 15 bp, Homo sapiens
ggaggacattatgct

SEQ ID NO: 2124449 - DNA, 15 bp, Homo sapiens
gacattatgctaagc

SEQ ID NO: 2124450 - DNA, 15 bp, Homo sapiens
acattatgctaagcc

SEQ ID NO: 2124451 - DNA, 15 bp, Homo sapiens
cattatgctaagcca

SEQ ID NO: 2124452 - DNA, 15 bp, Homo sapiens
attatgctaagccag

SEQ ID NO: 2124453 - DNA, 15 bp, Homo sapiens
ttatgctaagccagg

SEQ ID NO: 2124454 - DNA, 15 bp, Homo sapiens
tatgctaagccaggc

SEQ ID NO: 2124455 - DNA, 15 bp, Homo sapiens
atgctaagccaggca

SEQ ID NO: 2124456 - DNA, 15 bp, Homo sapiens
tgctaagccaggcac

SEQ ID NO: 2124457 - DNA, 15 bp, Homo sapiens
gctaagccaggcaca

SEQ ID NO: 2124458 - DNA, 15 bp, Homo sapiens
ctaagccaggcacag

SEQ ID NO: 2124459 - DNA, 15 bp, Homo sapiens
taagccaggcacaga

SEQ ID NO: 2124460 - DNA, 15 bp, Homo sapiens
aagccaggcacagaa

SEQ ID NO: 2124461 - DNA, 15 bp, Homo sapiens
agccaggcacagaaa

SEQ ID NO: 2124462 - DNA, 15 bp, Homo sapiens
gccaggcacagaaag

SEQ ID NO: 2124463 - DNA, 15 bp, Homo sapiens
ccaggcacagaaaga

SEQ ID NO: 2124464 - DNA, 15 bp, Homo sapiens
caggcacagaaagat

SEQ ID NO: 2124465 - DNA, 15 bp, Homo sapiens
aggcacagaaagatg

SEQ ID NO: 2124466 - DNA, 15 bp, Homo sapiens
ggcacagaaagatga

SEQ ID NO: 2124467 - DNA, 15 bp, Homo sapiens
gcacagaaagatgaa

SEQ ID NO: 2124468 - DNA, 15 bp, Homo sapiens
cacagaaagatgaat

SEQ ID NO: 2124469 - DNA, 15 bp, Homo sapiens
acagaaagatgaata

SEQ ID NO: 2124470 - DNA, 15 bp, Homo sapiens
cagaaagatgaatac

SEQ ID NO: 2124471 - DNA, 15 bp, Homo sapiens
agaaagatgaatact

SEQ ID NO: 2124472 - DNA, 15 bp, Homo sapiens
gaaagatgaatacta

SEQ ID NO: 2124473 - DNA, 15 bp, Homo sapiens
aaagatgaatactat

SEQ ID NO: 2124474 - DNA, 15 bp, Homo sapiens
aagatgaatactata

SEQ ID NO: 2124475 - DNA, 15 bp, Homo sapiens
agatgaatactatat

SEQ ID NO: 2124476 - DNA, 15 bp, Homo sapiens
gatgaatactatatt

SEQ ID NO: 2124477 - DNA, 15 bp, Homo sapiens
atgaatactatatta

SEQ ID NO: 2124478 - DNA, 15 bp, Homo sapiens
tgaatactatattat

SEQ ID NO: 2124479 - DNA, 15 bp, Homo sapiens
gaatactatattatc

SEQ ID NO: 2124480 - DNA, 15 bp, Homo sapiens
aatactatattatct

SEQ ID NO: 2124481 - DNA, 15 bp, Homo sapiens
atactatattatctc

SEQ ID NO: 2124482 - DNA, 15 bp, Homo sapiens
tactatattatctca

SEQ ID NO: 2124483 - DNA, 15 bp, Homo sapiens
actatattatctcac

SEQ ID NO: 2124484 - DNA, 15 bp, Homo sapiens
ctatattatctcact

SEQ ID NO: 2124485 - DNA, 15 bp, Homo sapiens
tatattatctcactt

SEQ ID NO: 2124486 - DNA, 15 bp, Homo sapiens
atattatctcacttg

SEQ ID NO: 2124487 - DNA, 15 bp, Homo sapiens
tattatctcacttgt

SEQ ID NO: 2124488 - DNA, 15 bp, Homo sapiens
attatctcacttgta

SEQ ID NO: 2124489 - DNA, 15 bp, Homo sapiens
ttatctcacttgtat

SEQ ID NO: 2124490 - DNA, 15 bp, Homo sapiens
tatctcacttgtatg

SEQ ID NO: 2124491 - DNA, 15 bp, Homo sapiens
atctcacttgtatgt

SEQ ID NO: 2124492 - DNA, 15 bp, Homo sapiens
tctcacttgtatgtg

SEQ ID NO: 2124493 - DNA, 15 bp, Homo sapiens
ctcacttgtatgtgt

SEQ ID NO: 2124494 - DNA, 15 bp, Homo sapiens
tcacttgtatgtgta

SEQ ID NO: 2124495 - DNA, 15 bp, Homo sapiens
cacttgtatgtgtaa

SEQ ID NO: 2124496 - DNA, 15 bp, Homo sapiens
acttgtatgtgtaat

SEQ ID NO: 2124497 - DNA, 15 bp, Homo sapiens
cttgtatgtgtaatt

SEQ ID NO: 2124498 - DNA, 15 bp, Homo sapiens
ttgtatgtgtaattt

SEQ ID NO: 2124499 - DNA, 15 bp, Homo sapiens
tgtatgtgtaatttt

SEQ ID NO: 2124500 - DNA, 15 bp, Homo sapiens
gtatgtgtaattttc

SEQ ID NO: 2124501 - DNA, 15 bp, Homo sapiens
tatgtgtaattttca

SEQ ID NO: 2124502 - DNA, 15 bp, Homo sapiens
atgtgtaattttcaa

SEQ ID NO: 2124503 - DNA, 15 bp, Homo sapiens
tgtgtaattttcaaa

SEQ ID NO: 2124504 - DNA, 15 bp, Homo sapiens
gtgtaattttcaaaa

SEQ ID NO: 2124505 - DNA, 15 bp, Homo sapiens
tgtaattttcaaaac

SEQ ID NO: 2124506 - DNA, 15 bp, Homo sapiens
gtaattttcaaaact

SEQ ID NO: 2124507 - DNA, 15 bp, Homo sapiens
taattttcaaaactt

SEQ ID NO: 2124508 - DNA, 15 bp, Homo sapiens
aattttcaaaacttg

SEQ ID NO: 2124509 - DNA, 15 bp, Homo sapiens
attttcaaaacttga

SEQ ID NO: 2124510 - DNA, 15 bp, Homo sapiens
ttttcaaaacttgaa

SEQ ID NO: 2124511 - DNA, 15 bp, Homo sapiens
tttcaaaacttgaac

SEQ ID NO: 2124512 - DNA, 15 bp, Homo sapiens
ttcaaaacttgaact

SEQ ID NO: 2124513 - DNA, 15 bp, Homo sapiens
tcaaaacttgaactt

SEQ ID NO: 2124514 - DNA, 15 bp, Homo sapiens
caaaacttgaacttg

SEQ ID NO: 2124515 - DNA, 15 bp, Homo sapiens
aaaacttgaacttgt

SEQ ID NO: 2124516 - DNA, 15 bp, Homo sapiens
aaacttgaacttgta

SEQ ID NO: 2124517 - DNA, 15 bp, Homo sapiens
aacttgaacttgtag

SEQ ID NO: 2124518 - DNA, 15 bp, Homo sapiens
acttgaacttgtagg

SEQ ID NO: 2124519 - DNA, 15 bp, Homo sapiens
cttgaacttgtaggg

SEQ ID NO: 2124520 - DNA, 15 bp, Homo sapiens
ttgaacttgtaggga

SEQ ID NO: 2124521 - DNA, 15 bp, Homo sapiens
tgaacttgtagggag

SEQ ID NO: 2124522 - DNA, 15 bp, Homo sapiens
gaacttgtagggagt

SEQ ID NO: 2124523 - DNA, 15 bp, Homo sapiens
aacttgtagggagta

SEQ ID NO: 2124524 - DNA, 15 bp, Homo sapiens
acttgtagggagtag

SEQ ID NO: 2124525 - DNA, 15 bp, Homo sapiens
cttgtagggagtaga

SEQ ID NO: 2124526 - DNA, 15 bp, Homo sapiens
ttgtagggagtagac

SEQ ID NO: 2124527 - DNA, 15 bp, Homo sapiens
tgtagggagtagact

SEQ ID NO: 2124528 - DNA, 15 bp, Homo sapiens
gtagggagtagactg

SEQ ID NO: 2124529 - DNA, 15 bp, Homo sapiens
tagggagtagactgg

SEQ ID NO: 2124530 - DNA, 15 bp, Homo sapiens
agggagtagactggt

SEQ ID NO: 2124531 - DNA, 15 bp, Homo sapiens
gggagtagactggtg

SEQ ID NO: 2124532 - DNA, 15 bp, Homo sapiens
ggagtagactggtgg

SEQ ID NO: 2124533 - DNA, 15 bp, Homo sapiens
gagtagactggtggt

SEQ ID NO: 2124534 - DNA, 15 bp, Homo sapiens
agtagactggtggtt

SEQ ID NO: 2124535 - DNA, 15 bp, Homo sapiens
gtagactggtggtta

SEQ ID NO: 2124536 - DNA, 15 bp, Homo sapiens
tagactggtggttaa

SEQ ID NO: 2124537 - DNA, 15 bp, Homo sapiens
agactggtggttaat

SEQ ID NO: 2124538 - DNA, 15 bp, Homo sapiens
gactggtggttaata

SEQ ID NO: 2124539 - DNA, 15 bp, Homo sapiens
actggtggttaataa

SEQ ID NO: 2124540 - DNA, 15 bp, Homo sapiens
ctggtggttaataat

SEQ ID NO: 2124541 - DNA, 15 bp, Homo sapiens
tggtggttaataatc

SEQ ID NO: 2124542 - DNA, 15 bp, Homo sapiens
ggtggttaataatct

SEQ ID NO: 2124543 - DNA, 15 bp, Homo sapiens
gtggttaataatctg

SEQ ID NO: 2124544 - DNA, 15 bp, Homo sapiens
tggttaataatctga

SEQ ID NO: 2124545 - DNA, 15 bp, Homo sapiens
ggttaataatctgaa

SEQ ID NO: 2124546 - DNA, 15 bp, Homo sapiens
gttaataatctgaag

SEQ ID NO: 2124547 - DNA, 15 bp, Homo sapiens
ttaataatctgaagg

SEQ ID NO: 2124548 - DNA, 15 bp, Homo sapiens
taataatctgaaggg

SEQ ID NO: 2124549 - DNA, 15 bp, Homo sapiens
aataatctgaaggga

SEQ ID NO: 2124550 - DNA, 15 bp, Homo sapiens
ataatctgaagggag

SEQ ID NO: 2124551 - DNA, 15 bp, Homo sapiens
taatctgaagggagg

SEQ ID NO: 2124552 - DNA, 15 bp, Homo sapiens
aatctgaagggaggg

SEQ ID NO: 2124553 - DNA, 15 bp, Homo sapiens
atctgaagggagggt

SEQ ID NO: 2124554 - DNA, 15 bp, Homo sapiens
tctgaagggagggta

SEQ ID NO: 2124555 - DNA, 15 bp, Homo sapiens
ctgaagggagggtaa

SEQ ID NO: 2124556 - DNA, 15 bp, Homo sapiens
tgaagggagggtaaa

SEQ ID NO: 2124557 - DNA, 15 bp, Homo sapiens
gaagggagggtaaaa

SEQ ID NO: 2124558 - DNA, 15 bp, Homo sapiens
aagggagggtaaaaa

SEQ ID NO: 2124559 - DNA, 15 bp, Homo sapiens
agggagggtaaaaat

SEQ ID NO: 2124560 - DNA, 15 bp, Homo sapiens
gggagggtaaaaatg

SEQ ID NO: 2124561 - DNA, 15 bp, Homo sapiens
ggagggtaaaaatgt

SEQ ID NO: 2124562 - DNA, 15 bp, Homo sapiens
gagggtaaaaatgtg

SEQ ID NO: 2124563 - DNA, 15 bp, Homo sapiens
agggtaaaaatgtgt

SEQ ID NO: 2124564 - DNA, 15 bp, Homo sapiens
gggtaaaaatgtgtt

SEQ ID NO: 2124565 - DNA, 15 bp, Homo sapiens
ggtaaaaatgtgttg

SEQ ID NO: 2124566 - DNA, 15 bp, Homo sapiens
gtaaaaatgtgttga

SEQ ID NO: 2124567 - DNA, 15 bp, Homo sapiens
taaaaatgtgttgat

SEQ ID NO: 2124568 - DNA, 15 bp, Homo sapiens
aaaaatgtgttgatc

SEQ ID NO: 2124569 - DNA, 15 bp, Homo sapiens
aaaatgtgttgatca

SEQ ID NO: 2124570 - DNA, 15 bp, Homo sapiens
aaatgtgttgatcaa

SEQ ID NO: 2124571 - DNA, 15 bp, Homo sapiens
aatgtgttgatcaaa

SEQ ID NO: 2124572 - DNA, 15 bp, Homo sapiens
atgtgttgatcaaag

SEQ ID NO: 2124573 - DNA, 15 bp, Homo sapiens
tgtgttgatcaaagg

SEQ ID NO: 2124574 - DNA, 15 bp, Homo sapiens
gtgttgatcaaagga

SEQ ID NO: 2124575 - DNA, 15 bp, Homo sapiens
tgttgatcaaaggat

SEQ ID NO: 2124576 - DNA, 15 bp, Homo sapiens
gttgatcaaaggata

SEQ ID NO: 2124577 - DNA, 15 bp, Homo sapiens
ttgatcaaaggataa

SEQ ID NO: 2124578 - DNA, 15 bp, Homo sapiens
tgatcaaaggataaa

SEQ ID NO: 2124579 - DNA, 15 bp, Homo sapiens
gatcaaaggataaaa

SEQ ID NO: 2124580 - DNA, 15 bp, Homo sapiens
atcaaaggataaaaa

SEQ ID NO: 2124581 - DNA, 15 bp, Homo sapiens
tcaaaggataaaaat

SEQ ID NO: 2124582 - DNA, 15 bp, Homo sapiens
caaaggataaaaatt

SEQ ID NO: 2124583 - DNA, 15 bp, Homo sapiens
aaaggataaaaattt

SEQ ID NO: 2124584 - DNA, 15 bp, Homo sapiens
aaggataaaaatttt

SEQ ID NO: 2124585 - DNA, 15 bp, Homo sapiens
aggataaaaatttta

SEQ ID NO: 2124586 - DNA, 15 bp, Homo sapiens
ggataaaaattttag

SEQ ID NO: 2124587 - DNA, 15 bp, Homo sapiens
gataaaaattttagt

SEQ ID NO: 2124588 - DNA, 15 bp, Homo sapiens
ataaaaattttagtt

SEQ ID NO: 2124589 - DNA, 15 bp, Homo sapiens
taaaaattttagtta

SEQ ID NO: 2124590 - DNA, 15 bp, Homo sapiens
aaaaattttagttag

SEQ ID NO: 2124591 - DNA, 15 bp, Homo sapiens
aaaattttagttaga

SEQ ID NO: 2124592 - DNA, 15 bp, Homo sapiens
aaattttagttagag

SEQ ID NO: 2124593 - DNA, 15 bp, Homo sapiens
aattttagttagaga

SEQ ID NO: 2124594 - DNA, 15 bp, Homo sapiens
attttagttagagag

SEQ ID NO: 2124595 - DNA, 15 bp, Homo sapiens
ttttagttagagaga

SEQ ID NO: 2124596 - DNA, 15 bp, Homo sapiens
tttagttagagagaa

SEQ ID NO: 2124597 - DNA, 15 bp, Homo sapiens
ttagttagagagaag

SEQ ID NO: 2124598 - DNA, 15 bp, Homo sapiens
tagttagagagaagg

SEQ ID NO: 2124599 - DNA, 15 bp, Homo sapiens
agttagagagaagga

SEQ ID NO: 2124600 - DNA, 15 bp, Homo sapiens
gttagagagaaggaa

SEQ ID NO: 2124601 - DNA, 15 bp, Homo sapiens
ttagagagaaggaat

SEQ ID NO: 2124602 - DNA, 15 bp, Homo sapiens
tagagagaaggaata

SEQ ID NO: 2124603 - DNA, 15 bp, Homo sapiens
agagagaaggaataa

SEQ ID NO: 2124604 - DNA, 15 bp, Homo sapiens
gagagaaggaataag

SEQ ID NO: 2124605 - DNA, 15 bp, Homo sapiens
agagaaggaataagt

SEQ ID NO: 2124606 - DNA, 15 bp, Homo sapiens
gagaaggaataagtt

SEQ ID NO: 2124607 - DNA, 15 bp, Homo sapiens
agaaggaataagttt

SEQ ID NO: 2124608 - DNA, 15 bp, Homo sapiens
gaaggaataagtttt

SEQ ID NO: 2124609 - DNA, 15 bp, Homo sapiens
aaggaataagttttt

SEQ ID NO: 2124610 - DNA, 15 bp, Homo sapiens
aggaataagtttttg

SEQ ID NO: 2124611 - DNA, 15 bp, Homo sapiens
ggaataagtttttga

SEQ ID NO: 2124612 - DNA, 15 bp, Homo sapiens
gaataagtttttgag

SEQ ID NO: 2124613 - DNA, 15 bp, Homo sapiens
aataagtttttgaga

SEQ ID NO: 2124614 - DNA, 15 bp, Homo sapiens
ataagtttttgagat

SEQ ID NO: 2124615 - DNA, 15 bp, Homo sapiens
taagtttttgagata

SEQ ID NO: 2124616 - DNA, 15 bp, Homo sapiens
aagtttttgagatat

SEQ ID NO: 2124617 - DNA, 15 bp, Homo sapiens
agtttttgagatata

SEQ ID NO: 2124618 - DNA, 15 bp, Homo sapiens
gtttttgagatatat

SEQ ID NO: 2124619 - DNA, 15 bp, Homo sapiens
tttttgagatatatt

SEQ ID NO: 2124620 - DNA, 15 bp, Homo sapiens
ttttgagatatattg

SEQ ID NO: 2124621 - DNA, 15 bp, Homo sapiens
tttgagatatattgc

SEQ ID NO: 2124622 - DNA, 15 bp, Homo sapiens
ttgagatatattgca

SEQ ID NO: 2124623 - DNA, 15 bp, Homo sapiens
tgagatatattgcag

SEQ ID NO: 2124624 - DNA, 15 bp, Homo sapiens
gagatatattgcaga

SEQ ID NO: 2124625 - DNA, 15 bp, Homo sapiens
agatatattgcagag

SEQ ID NO: 2124626 - DNA, 15 bp, Homo sapiens
gatatattgcagagc

SEQ ID NO: 2124627 - DNA, 15 bp, Homo sapiens
atatattgcagagca

SEQ ID NO: 2124628 - DNA, 15 bp, Homo sapiens
tatattgcagagcat

SEQ ID NO: 2124629 - DNA, 15 bp, Homo sapiens
atattgcagagcatg

SEQ ID NO: 2124630 - DNA, 15 bp, Homo sapiens
tattgcagagcatga

SEQ ID NO: 2124631 - DNA, 15 bp, Homo sapiens
attgcagagcatgat

SEQ ID NO: 2124632 - DNA, 15 bp, Homo sapiens
ttgcagagcatgatg

SEQ ID NO: 2124633 - DNA, 15 bp, Homo sapiens
tgcagagcatgatga

SEQ ID NO: 2124634 - DNA, 15 bp, Homo sapiens
gcagagcatgatgac

SEQ ID NO: 2124635 - DNA, 15 bp, Homo sapiens
cagagcatgatgaca

SEQ ID NO: 2124636 - DNA, 15 bp, Homo sapiens
agagcatgatgacaa

SEQ ID NO: 2124637 - DNA, 15 bp, Homo sapiens
gagcatgatgacaat

SEQ ID NO: 2124638 - DNA, 15 bp, Homo sapiens
agcatgatgacaata

SEQ ID NO: 2124639 - DNA, 15 bp, Homo sapiens
gcatgatgacaatag

SEQ ID NO: 2124640 - DNA, 15 bp, Homo sapiens
catgatgacaatagt

SEQ ID NO: 2124641 - DNA, 15 bp, Homo sapiens
atgatgacaatagtg

SEQ ID NO: 2124642 - DNA, 15 bp, Homo sapiens
tgatgacaatagtga

SEQ ID NO: 2124643 - DNA, 15 bp, Homo sapiens
gatgacaatagtgat

SEQ ID NO: 2124644 - DNA, 15 bp, Homo sapiens
atgacaatagtgata

SEQ ID NO: 2124645 - DNA, 15 bp, Homo sapiens
tgacaatagtgataa

SEQ ID NO: 2124646 - DNA, 15 bp, Homo sapiens
gacaatagtgataag

SEQ ID NO: 2124647 - DNA, 15 bp, Homo sapiens
acaatagtgataagg

SEQ ID NO: 2124648 - DNA, 15 bp, Homo sapiens
caatagtgataaggt

SEQ ID NO: 2124649 - DNA, 15 bp, Homo sapiens
aatagtgataaggta

SEQ ID NO: 2124650 - DNA, 15 bp, Homo sapiens
atagtgataaggtat

SEQ ID NO: 2124651 - DNA, 15 bp, Homo sapiens
tagtgataaggtatt

SEQ ID NO: 2124652 - DNA, 15 bp, Homo sapiens
agtgataaggtattg

SEQ ID NO: 2124653 - DNA, 15 bp, Homo sapiens
gtgataaggtattgt

SEQ ID NO: 2124654 - DNA, 15 bp, Homo sapiens
tgataaggtattgta

SEQ ID NO: 2124655 - DNA, 15 bp, Homo sapiens
gataaggtattgtac

SEQ ID NO: 2124656 - DNA, 15 bp, Homo sapiens
ataaggtattgtaca

SEQ ID NO: 2124657 - DNA, 15 bp, Homo sapiens
taaggtattgtacat

SEQ ID NO: 2124658 - DNA, 15 bp, Homo sapiens
aaggtattgtacatt

SEQ ID NO: 2124659 - DNA, 15 bp, Homo sapiens
aggtattgtacattt

SEQ ID NO: 2124660 - DNA, 15 bp, Homo sapiens
ggtattgtacatttc

SEQ ID NO: 2124661 - DNA, 15 bp, Homo sapiens
gtattgtacatttca

SEQ ID NO: 2124662 - DNA, 15 bp, Homo sapiens
tattgtacatttcaa

SEQ ID NO: 2124663 - DNA, 15 bp, Homo sapiens
attgtacatttcaaa

SEQ ID NO: 2124664 - DNA, 15 bp, Homo sapiens
ttgtacatttcaaaa

SEQ ID NO: 2124665 - DNA, 15 bp, Homo sapiens
tgtacatttcaaaaa

SEQ ID NO: 2124666 - DNA, 15 bp, Homo sapiens
gtacatttcaaaaac

SEQ ID NO: 2124667 - DNA, 15 bp, Homo sapiens
tacatttcaaaaact

SEQ ID NO: 2124668 - DNA, 15 bp, Homo sapiens
acatttcaaaaactg

SEQ ID NO: 2124669 - DNA, 15 bp, Homo sapiens
catttcaaaaactgc

SEQ ID NO: 2124670 - DNA, 15 bp, Homo sapiens
atttcaaaaactgct

SEQ ID NO: 2124671 - DNA, 15 bp, Homo sapiens
tttcaaaaactgcta

SEQ ID NO: 2124672 - DNA, 15 bp, Homo sapiens
ttcaaaaactgctaa

SEQ ID NO: 2124673 - DNA, 15 bp, Homo sapiens
tcaaaaactgctaag

SEQ ID NO: 2124674 - DNA, 15 bp, Homo sapiens
caaaaactgctaagt

SEQ ID NO: 2124675 - DNA, 15 bp, Homo sapiens
aaaaactgctaagta

SEQ ID NO: 2124676 - DNA, 15 bp, Homo sapiens
aaaactgctaagtaa

SEQ ID NO: 2124677 - DNA, 15 bp, Homo sapiens
aaactgctaagtaaa

SEQ ID NO: 2124678 - DNA, 15 bp, Homo sapiens
aactgctaagtaaat

SEQ ID NO: 2124679 - DNA, 15 bp, Homo sapiens
actgctaagtaaatt

SEQ ID NO: 2124680 - DNA, 15 bp, Homo sapiens
ctgctaagtaaattt

SEQ ID NO: 2124681 - DNA, 15 bp, Homo sapiens
tgctaagtaaatttt

SEQ ID NO: 2124682 - DNA, 15 bp, Homo sapiens
gctaagtaaatttta

SEQ ID NO: 2124683 - DNA, 15 bp, Homo sapiens
ctaagtaaattttaa

SEQ ID NO: 2124684 - DNA, 15 bp, Homo sapiens
taagtaaattttaag

SEQ ID NO: 2124685 - DNA, 15 bp, Homo sapiens
aagtaaattttaagt

SEQ ID NO: 2124686 - DNA, 15 bp, Homo sapiens
agtaaattttaagta

SEQ ID NO: 2124687 - DNA, 15 bp, Homo sapiens
gtaaattttaagtat

SEQ ID NO: 2124688 - DNA, 15 bp, Homo sapiens
taaattttaagtatt

SEQ ID NO: 2124689 - DNA, 15 bp, Homo sapiens
aaattttaagtattc

SEQ ID NO: 2124690 - DNA, 15 bp, Homo sapiens
aattttaagtattct

SEQ ID NO: 2124691 - DNA, 15 bp, Homo sapiens
attttaagtattctc

SEQ ID NO: 2124692 - DNA, 15 bp, Homo sapiens
ttttaagtattctca

SEQ ID NO: 2124693 - DNA, 15 bp, Homo sapiens
tttaagtattctcat

SEQ ID NO: 2124694 - DNA, 15 bp, Homo sapiens
ttaagtattctcatc

SEQ ID NO: 2124695 - DNA, 15 bp, Homo sapiens
taagtattctcatca

SEQ ID NO: 2124696 - DNA, 15 bp, Homo sapiens
aagtattctcatcac

SEQ ID NO: 2124697 - DNA, 15 bp, Homo sapiens
agtattctcatcaca

SEQ ID NO: 2124698 - DNA, 15 bp, Homo sapiens
gtattctcatcacaa

SEQ ID NO: 2124699 - DNA, 15 bp, Homo sapiens
tattctcatcacaaa

SEQ ID NO: 2124700 - DNA, 15 bp, Homo sapiens
attctcatcacaaaa

SEQ ID NO: 2124701 - DNA, 15 bp, Homo sapiens
ttctcatcacaaaat

SEQ ID NO: 2124702 - DNA, 15 bp, Homo sapiens
tctcatcacaaaata

SEQ ID NO: 2124703 - DNA, 15 bp, Homo sapiens
ctcatcacaaaataa

SEQ ID NO: 2124704 - DNA, 15 bp, Homo sapiens
tcatcacaaaataag

SEQ ID NO: 2124705 - DNA, 15 bp, Homo sapiens
catcacaaaataagt

SEQ ID NO: 2124706 - DNA, 15 bp, Homo sapiens
atcacaaaataagta

SEQ ID NO: 2124707 - DNA, 15 bp, Homo sapiens
tcacaaaataagtat

SEQ ID NO: 2124708 - DNA, 15 bp, Homo sapiens
cacaaaataagtatg

SEQ ID NO: 2124709 - DNA, 15 bp, Homo sapiens
acaaaataagtatgt

SEQ ID NO: 2124710 - DNA, 15 bp, Homo sapiens
caaaataagtatgtg

SEQ ID NO: 2124711 - DNA, 15 bp, Homo sapiens
aaaataagtatgtga

SEQ ID NO: 2124712 - DNA, 15 bp, Homo sapiens
aaataagtatgtgag

SEQ ID NO: 2124713 - DNA, 15 bp, Homo sapiens
aataagtatgtgagc

SEQ ID NO: 2124714 - DNA, 15 bp, Homo sapiens
ataagtatgtgagct

SEQ ID NO: 2124715 - DNA, 15 bp, Homo sapiens
taagtatgtgagctg

SEQ ID NO: 2124716 - DNA, 15 bp, Homo sapiens
aagtatgtgagctga

SEQ ID NO: 2124717 - DNA, 15 bp, Homo sapiens
agtatgtgagctgag

SEQ ID NO: 2124718 - DNA, 15 bp, Homo sapiens
gtatgtgagctgaga

SEQ ID NO: 2124719 - DNA, 15 bp, Homo sapiens
tatgtgagctgagat

SEQ ID NO: 2124720 - DNA, 15 bp, Homo sapiens
atgtgagctgagata

SEQ ID NO: 2124721 - DNA, 15 bp, Homo sapiens
tgtgagctgagatat

SEQ ID NO: 2124722 - DNA, 15 bp, Homo sapiens
gtgagctgagatata

SEQ ID NO: 2124723 - DNA, 15 bp, Homo sapiens
tgagctgagatatat

SEQ ID NO: 2124724 - DNA, 15 bp, Homo sapiens
gagctgagatatata

SEQ ID NO: 2124725 - DNA, 15 bp, Homo sapiens
agctgagatatatag

SEQ ID NO: 2124726 - DNA, 15 bp, Homo sapiens
gctgagatatatagt

SEQ ID NO: 2124727 - DNA, 15 bp, Homo sapiens
ctgagatatatagta

SEQ ID NO: 2124728 - DNA, 15 bp, Homo sapiens
tgagatatatagtaa

SEQ ID NO: 2124729 - DNA, 15 bp, Homo sapiens
gagatatatagtaat

SEQ ID NO: 2124730 - DNA, 15 bp, Homo sapiens
agatatatagtaatt

SEQ ID NO: 2124731 - DNA, 15 bp, Homo sapiens
gatatatagtaatta

SEQ ID NO: 2124732 - DNA, 15 bp, Homo sapiens
atatatagtaattag

SEQ ID NO: 2124733 - DNA, 15 bp, Homo sapiens
tatatagtaattagc

SEQ ID NO: 2124734 - DNA, 15 bp, Homo sapiens
atatagtaattagct

SEQ ID NO: 2124735 - DNA, 15 bp, Homo sapiens
tatagtaattagctt

SEQ ID NO: 2124736 - DNA, 15 bp, Homo sapiens
atagtaattagcttg

SEQ ID NO: 2124737 - DNA, 15 bp, Homo sapiens
tagtaattagcttga

SEQ ID NO: 2124738 - DNA, 15 bp, Homo sapiens
agtaattagcttgat

SEQ ID NO: 2124739 - DNA, 15 bp, Homo sapiens
gtaattagcttgatt

SEQ ID NO: 2124740 - DNA, 15 bp, Homo sapiens
taattagcttgattt

SEQ ID NO: 2124741 - DNA, 15 bp, Homo sapiens
aattagcttgattta

SEQ ID NO: 2124742 - DNA, 15 bp, Homo sapiens
attagcttgatttaa

SEQ ID NO: 2124743 - DNA, 15 bp, Homo sapiens
ttagcttgatttaat

SEQ ID NO: 2124744 - DNA, 15 bp, Homo sapiens
tagcttgatttaatt

SEQ ID NO: 2124745 - DNA, 15 bp, Homo sapiens
agcttgatttaatta

SEQ ID NO: 2124746 - DNA, 15 bp, Homo sapiens
gcttgatttaattat

SEQ ID NO: 2124747 - DNA, 15 bp, Homo sapiens
cttgatttaattatt

SEQ ID NO: 2124748 - DNA, 15 bp, Homo sapiens
ttgatttaattattc

SEQ ID NO: 2124749 - DNA, 15 bp, Homo sapiens
tgatttaattattct

SEQ ID NO: 2124750 - DNA, 15 bp, Homo sapiens
gatttaattattcta

SEQ ID NO: 2124751 - DNA, 15 bp, Homo sapiens
atttaattattctac

SEQ ID NO: 2124752 - DNA, 15 bp, Homo sapiens
tttaattattctaca

SEQ ID NO: 2124753 - DNA, 15 bp, Homo sapiens
ttaattattctacaa

SEQ ID NO: 2124754 - DNA, 15 bp, Homo sapiens
taattattctacaat

SEQ ID NO: 2124755 - DNA, 15 bp, Homo sapiens
aattattctacaatg

SEQ ID NO: 2124756 - DNA, 15 bp, Homo sapiens
attattctacaatgc

SEQ ID NO: 2124757 - DNA, 15 bp, Homo sapiens
ttattctacaatgca

SEQ ID NO: 2124758 - DNA, 15 bp, Homo sapiens
tattctacaatgcat

SEQ ID NO: 2124759 - DNA, 15 bp, Homo sapiens
attctacaatgcatg

SEQ ID NO: 2124760 - DNA, 15 bp, Homo sapiens
ttctacaatgcatgc

SEQ ID NO: 2124761 - DNA, 15 bp, Homo sapiens
tctacaatgcatgca

SEQ ID NO: 2124762 - DNA, 15 bp, Homo sapiens
ctacaatgcatgcat

SEQ ID NO: 2124763 - DNA, 15 bp, Homo sapiens
tacaatgcatgcata

SEQ ID NO: 2124764 - DNA, 15 bp, Homo sapiens
acaatgcatgcatat

SEQ ID NO: 2124765 - DNA, 15 bp, Homo sapiens
caatgcatgcatata

SEQ ID NO: 2124766 - DNA, 15 bp, Homo sapiens
aatgcatgcatatat

SEQ ID NO: 2124767 - DNA, 15 bp, Homo sapiens
atgcatgcatatatc

SEQ ID NO: 2124768 - DNA, 15 bp, Homo sapiens
tgcatgcatatatca

SEQ ID NO: 2124769 - DNA, 15 bp, Homo sapiens
gcatgcatatatcaa

SEQ ID NO: 2124770 - DNA, 15 bp, Homo sapiens
catgcatatatcaaa

SEQ ID NO: 2124771 - DNA, 15 bp, Homo sapiens
atgcatatatcaaaa

SEQ ID NO: 2124772 - DNA, 15 bp, Homo sapiens
tgcatatatcaaaat

SEQ ID NO: 2124773 - DNA, 15 bp, Homo sapiens
gcatatatcaaaata

SEQ ID NO: 2124774 - DNA, 15 bp, Homo sapiens
catatatcaaaatac

SEQ ID NO: 2124775 - DNA, 15 bp, Homo sapiens
atatatcaaaatacc

SEQ ID NO: 2124776 - DNA, 15 bp, Homo sapiens
tatatcaaaatacca

SEQ ID NO: 2124777 - DNA, 15 bp, Homo sapiens
atatcaaaataccac

SEQ ID NO: 2124778 - DNA, 15 bp, Homo sapiens
tatcaaaataccaca

SEQ ID NO: 2124779 - DNA, 15 bp, Homo sapiens
atcaaaataccacat

SEQ ID NO: 2124780 - DNA, 15 bp, Homo sapiens
tcaaaataccacatt

SEQ ID NO: 2124781 - DNA, 15 bp, Homo sapiens
caaaataccacattt

SEQ ID NO: 2124782 - DNA, 15 bp, Homo sapiens
aaaataccacatttt

SEQ ID NO: 2124783 - DNA, 15 bp, Homo sapiens
aaataccacatttta

SEQ ID NO: 2124784 - DNA, 15 bp, Homo sapiens
aataccacattttac

SEQ ID NO: 2124785 - DNA, 15 bp, Homo sapiens
ataccacattttact

SEQ ID NO: 2124786 - DNA, 15 bp, Homo sapiens
taccacattttactc

SEQ ID NO: 2124787 - DNA, 15 bp, Homo sapiens
accacattttactcc

SEQ ID NO: 2124788 - DNA, 15 bp, Homo sapiens
ccacattttactcca

SEQ ID NO: 2124789 - DNA, 15 bp, Homo sapiens
cacattttactccat

SEQ ID NO: 2124790 - DNA, 15 bp, Homo sapiens
acattttactccatg

SEQ ID NO: 2124791 - DNA, 15 bp, Homo sapiens
cattttactccatga

SEQ ID NO: 2124792 - DNA, 15 bp, Homo sapiens
attttactccatgaa

SEQ ID NO: 2124793 - DNA, 15 bp, Homo sapiens
ttttactccatgaat

SEQ ID NO: 2124794 - DNA, 15 bp, Homo sapiens
tttactccatgaata

SEQ ID NO: 2124795 - DNA, 15 bp, Homo sapiens
ttactccatgaatat

SEQ ID NO: 2124796 - DNA, 15 bp, Homo sapiens
tactccatgaatata

SEQ ID NO: 2124797 - DNA, 15 bp, Homo sapiens
actccatgaatatat

SEQ ID NO: 2124798 - DNA, 15 bp, Homo sapiens
ctccatgaatatata

SEQ ID NO: 2124799 - DNA, 15 bp, Homo sapiens
tccatgaatatatac

SEQ ID NO: 2124800 - DNA, 15 bp, Homo sapiens
ccatgaatatataca

SEQ ID NO: 2124801 - DNA, 15 bp, Homo sapiens
catgaatatatacaa

SEQ ID NO: 2124802 - DNA, 15 bp, Homo sapiens
atgaatatatacaat

SEQ ID NO: 2124803 - DNA, 15 bp, Homo sapiens
tgaatatatacaatt

SEQ ID NO: 2124804 - DNA, 15 bp, Homo sapiens
gaatatatacaatta

SEQ ID NO: 2124805 - DNA, 15 bp, Homo sapiens
aatatatacaattat

SEQ ID NO: 2124806 - DNA, 15 bp, Homo sapiens
atatatacaattatt

SEQ ID NO: 2124807 - DNA, 15 bp, Homo sapiens
tatatacaattattt

SEQ ID NO: 2124808 - DNA, 15 bp, Homo sapiens
atatacaattatttg

SEQ ID NO: 2124809 - DNA, 15 bp, Homo sapiens
tatacaattatttgt

SEQ ID NO: 2124810 - DNA, 15 bp, Homo sapiens
atacaattatttgtg

SEQ ID NO: 2124811 - DNA, 15 bp, Homo sapiens
tacaattatttgtga

SEQ ID NO: 2124812 - DNA, 15 bp, Homo sapiens
acaattatttgtgaa

SEQ ID NO: 2124813 - DNA, 15 bp, Homo sapiens
caattatttgtgaac

SEQ ID NO: 2124814 - DNA, 15 bp, Homo sapiens
aattatttgtgaact

SEQ ID NO: 2124815 - DNA, 15 bp, Homo sapiens
attatttgtgaacta

SEQ ID NO: 2124816 - DNA, 15 bp, Homo sapiens
ttatttgtgaactaa

SEQ ID NO: 2124817 - DNA, 15 bp, Homo sapiens
tatttgtgaactaaa

SEQ ID NO: 2124818 - DNA, 15 bp, Homo sapiens
atttgtgaactaaaa

SEQ ID NO: 2124819 - DNA, 15 bp, Homo sapiens
tttgtgaactaaaaa

SEQ ID NO: 2124820 - DNA, 15 bp, Homo sapiens
ttgtgaactaaaaat

SEQ ID NO: 2124821 - DNA, 15 bp, Homo sapiens
tgtgaactaaaaata

SEQ ID NO: 2124822 - DNA, 15 bp, Homo sapiens
gtgaactaaaaatac

SEQ ID NO: 2124823 - DNA, 15 bp, Homo sapiens
tgaactaaaaataca

SEQ ID NO: 2124824 - DNA, 15 bp, Homo sapiens
gaactaaaaatacat

SEQ ID NO: 2124825 - DNA, 15 bp, Homo sapiens
aactaaaaatacatt

SEQ ID NO: 2124826 - DNA, 15 bp, Homo sapiens
actaaaaatacattt

SEQ ID NO: 2124827 - DNA, 15 bp, Homo sapiens
ctaaaaatacatttg

SEQ ID NO: 2124828 - DNA, 15 bp, Homo sapiens
taaaaatacatttga

SEQ ID NO: 2124829 - DNA, 15 bp, Homo sapiens
aaaaatacatttgaa

SEQ ID NO: 2124830 - DNA, 15 bp, Homo sapiens
aaaatacatttgaaa

SEQ ID NO: 2124831 - DNA, 15 bp, Homo sapiens
aaatacatttgaaaa

SEQ ID NO: 2124832 - DNA, 15 bp, Homo sapiens
aatacatttgaaaaa

SEQ ID NO: 2124833 - DNA, 15 bp, Homo sapiens
atacatttgaaaaag

SEQ ID NO: 2124834 - DNA, 15 bp, Homo sapiens
tacatttgaaaaaga

SEQ ID NO: 2124835 - DNA, 15 bp, Homo sapiens
acatttgaaaaagaa

SEQ ID NO: 2124836 - DNA, 15 bp, Homo sapiens
catttgaaaaagaac

SEQ ID NO: 2124837 - DNA, 15 bp, Homo sapiens
atttgaaaaagaact

SEQ ID NO: 2124838 - DNA, 15 bp, Homo sapiens
tttgaaaaagaacta

SEQ ID NO: 2124839 - DNA, 15 bp, Homo sapiens
ttgaaaaagaactac

SEQ ID NO: 2124840 - DNA, 15 bp, Homo sapiens
tgaaaaagaactact

SEQ ID NO: 2124841 - DNA, 15 bp, Homo sapiens
gaaaaagaactacta

SEQ ID NO: 2124842 - DNA, 15 bp, Homo sapiens
aaaaagaactactag

SEQ ID NO: 2124843 - DNA, 15 bp, Homo sapiens
aaaagaactactaga

SEQ ID NO: 2124844 - DNA, 15 bp, Homo sapiens
aaagaactactagaa

SEQ ID NO: 2124845 - DNA, 15 bp, Homo sapiens
aagaactactagaaa

SEQ ID NO: 2124846 - DNA, 15 bp, Homo sapiens
agaactactagaaaa

SEQ ID NO: 2124847 - DNA, 15 bp, Homo sapiens
gaactactagaaaaa

SEQ ID NO: 2124848 - DNA, 15 bp, Homo sapiens
aactactagaaaaac

SEQ ID NO: 2124849 - DNA, 15 bp, Homo sapiens
actactagaaaaact

SEQ ID NO: 2124850 - DNA, 15 bp, Homo sapiens
ctactagaaaaacta

SEQ ID NO: 2124851 - DNA, 15 bp, Homo sapiens
tactagaaaaactaa

SEQ ID NO: 2124852 - DNA, 15 bp, Homo sapiens
actagaaaaactaaa

SEQ ID NO: 2124853 - DNA, 15 bp, Homo sapiens
ctagaaaaactaaaa

SEQ ID NO: 2124854 - DNA, 15 bp, Homo sapiens
tagaaaaactaaaaa

SEQ ID NO: 2124855 - DNA, 15 bp, Homo sapiens
agaaaaactaaaaat

SEQ ID NO: 2124856 - DNA, 15 bp, Homo sapiens
gaaaaactaaaaatg

SEQ ID NO: 2124857 - DNA, 15 bp, Homo sapiens
aaaaactaaaaatga

SEQ ID NO: 2124858 - DNA, 15 bp, Homo sapiens
aaaactaaaaatgag

SEQ ID NO: 2124859 - DNA, 15 bp, Homo sapiens
aaactaaaaatgaga

SEQ ID NO: 2124860 - DNA, 15 bp, Homo sapiens
aactaaaaatgagaa

SEQ ID NO: 2124861 - DNA, 15 bp, Homo sapiens
actaaaaatgagaaa

SEQ ID NO: 2124862 - DNA, 15 bp, Homo sapiens
ctaaaaatgagaaaa

SEQ ID NO: 2124863 - DNA, 15 bp, Homo sapiens
taaaaatgagaaaat

SEQ ID NO: 2124864 - DNA, 15 bp, Homo sapiens
aaaaatgagaaaata

SEQ ID NO: 2124865 - DNA, 15 bp, Homo sapiens
aaaatgagaaaataa

SEQ ID NO: 2124866 - DNA, 15 bp, Homo sapiens
aaatgagaaaataaa

SEQ ID NO: 2124867 - DNA, 15 bp, Homo sapiens
aatgagaaaataaat

SEQ ID NO: 2124868 - DNA, 15 bp, Homo sapiens
atgagaaaataaata

SEQ ID NO: 2124869 - DNA, 15 bp, Homo sapiens
tgagaaaataaataa

SEQ ID NO: 2124870 - DNA, 15 bp, Homo sapiens
gagaaaataaataag

SEQ ID NO: 2124871 - DNA, 15 bp, Homo sapiens
agaaaataaataagc

SEQ ID NO: 2124872 - DNA, 15 bp, Homo sapiens
gaaaataaataagca

SEQ ID NO: 2124873 - DNA, 15 bp, Homo sapiens
aaaataaataagcac

SEQ ID NO: 2124874 - DNA, 15 bp, Homo sapiens
aaataaataagcaca

SEQ ID NO: 2124875 - DNA, 15 bp, Homo sapiens
aataaataagcacat

SEQ ID NO: 2124876 - DNA, 15 bp, Homo sapiens
ataaataagcacatt

SEQ ID NO: 2124877 - DNA, 15 bp, Homo sapiens
taaataagcacatta

SEQ ID NO: 2124878 - DNA, 15 bp, Homo sapiens
aaataagcacattaa

SEQ ID NO: 2124879 - DNA, 15 bp, Homo sapiens
aataagcacattaat

SEQ ID NO: 2124880 - DNA, 15 bp, Homo sapiens
ataagcacattaatt

SEQ ID NO: 2124881 - DNA, 15 bp, Homo sapiens
taagcacattaatta

SEQ ID NO: 2124882 - DNA, 15 bp, Homo sapiens
aagcacattaattaa

SEQ ID NO: 2124883 - DNA, 15 bp, Homo sapiens
agcacattaattaat

SEQ ID NO: 2124884 - DNA, 15 bp, Homo sapiens
gcacattaattaatt

SEQ ID NO: 2124885 - DNA, 15 bp, Homo sapiens
cacattaattaatta

SEQ ID NO: 2124886 - DNA, 15 bp, Homo sapiens
acattaattaattaa

SEQ ID NO: 2124887 - DNA, 15 bp, Homo sapiens
cattaattaattaat

SEQ ID NO: 2124888 - DNA, 15 bp, Homo sapiens
attaattaattaatt

SEQ ID NO: 2124889 - DNA, 15 bp, Homo sapiens
ttaattaattaatta

SEQ ID NO: 2124890 - DNA, 15 bp, Homo sapiens
taattaattaattaa

SEQ ID NO: 2124891 - DNA, 15 bp, Homo sapiens
aattaattaattaaa

SEQ ID NO: 2124892 - DNA, 15 bp, Homo sapiens
attaattaattaaaa

SEQ ID NO: 2124893 - DNA, 15 bp, Homo sapiens
ttaattaattaaaat

SEQ ID NO: 2124894 - DNA, 15 bp, Homo sapiens
taattaattaaaatc

SEQ ID NO: 2124895 - DNA, 15 bp, Homo sapiens
aattaattaaaatcc

SEQ ID NO: 2124896 - DNA, 15 bp, Homo sapiens
attaattaaaatcct

SEQ ID NO: 2124897 - DNA, 15 bp, Homo sapiens
ttaattaaaatcctt

SEQ ID NO: 2124898 - DNA, 15 bp, Homo sapiens
taattaaaatccttg

SEQ ID NO: 2124899 - DNA, 15 bp, Homo sapiens
aattaaaatccttgt

SEQ ID NO: 2124900 - DNA, 15 bp, Homo sapiens
attaaaatccttgtc

SEQ ID NO: 2124901 - DNA, 15 bp, Homo sapiens
ttaaaatccttgtct

SEQ ID NO: 2124902 - DNA, 15 bp, Homo sapiens
taaaatccttgtcta

SEQ ID NO: 2124903 - DNA, 15 bp, Homo sapiens
aaaatccttgtctag

SEQ ID NO: 2124904 - DNA, 15 bp, Homo sapiens
aaatccttgtctagt

SEQ ID NO: 2124905 - DNA, 15 bp, Homo sapiens
aatccttgtctagta

SEQ ID NO: 2124906 - DNA, 15 bp, Homo sapiens
atccttgtctagtaa

SEQ ID NO: 2124907 - DNA, 15 bp, Homo sapiens
tccttgtctagtaag

SEQ ID NO: 2124908 - DNA, 15 bp, Homo sapiens
ccttgtctagtaagt

SEQ ID NO: 2124909 - DNA, 15 bp, Homo sapiens
cttgtctagtaagtt

SEQ ID NO: 2124910 - DNA, 15 bp, Homo sapiens
ttgtctagtaagttt

SEQ ID NO: 2124911 - DNA, 15 bp, Homo sapiens
tgtctagtaagttta

SEQ ID NO: 2124912 - DNA, 15 bp, Homo sapiens
gtctagtaagtttaa

SEQ ID NO: 2124913 - DNA, 15 bp, Homo sapiens
tctagtaagtttaat

SEQ ID NO: 2124914 - DNA, 15 bp, Homo sapiens
ctagtaagtttaatg

SEQ ID NO: 2124915 - DNA, 15 bp, Homo sapiens
tagtaagtttaatgt

SEQ ID NO: 2124916 - DNA, 15 bp, Homo sapiens
agtaagtttaatgtt

SEQ ID NO: 2124917 - DNA, 15 bp, Homo sapiens
gtaagtttaatgttg

SEQ ID NO: 2124918 - DNA, 15 bp, Homo sapiens
taagtttaatgttgg

SEQ ID NO: 2124919 - DNA, 15 bp, Homo sapiens
aagtttaatgttggt

SEQ ID NO: 2124920 - DNA, 15 bp, Homo sapiens
agtttaatgttggta

SEQ ID NO: 2124921 - DNA, 15 bp, Homo sapiens
gtttaatgttggtac

SEQ ID NO: 2124922 - DNA, 15 bp, Homo sapiens
tttaatgttggtact

SEQ ID NO: 2124923 - DNA, 15 bp, Homo sapiens
ttaatgttggtactt

SEQ ID NO: 2124924 - DNA, 15 bp, Homo sapiens
taatgttggtacttt

SEQ ID NO: 2124925 - DNA, 15 bp, Homo sapiens
aatgttggtactttc

SEQ ID NO: 2124926 - DNA, 15 bp, Homo sapiens
atgttggtactttct

SEQ ID NO: 2124927 - DNA, 15 bp, Homo sapiens
tgttggtactttctc

SEQ ID NO: 2124928 - DNA, 15 bp, Homo sapiens
gttggtactttctca

SEQ ID NO: 2124929 - DNA, 15 bp, Homo sapiens
ttggtactttctcag

SEQ ID NO: 2124930 - DNA, 15 bp, Homo sapiens
tggtactttctcagg

SEQ ID NO: 2124931 - DNA, 15 bp, Homo sapiens
ggtactttctcaggg

SEQ ID NO: 2124932 - DNA, 15 bp, Homo sapiens
gtactttctcaggga

SEQ ID NO: 2124933 - DNA, 15 bp, Homo sapiens
tactttctcagggac

SEQ ID NO: 2124934 - DNA, 15 bp, Homo sapiens
actttctcagggacc

SEQ ID NO: 2124935 - DNA, 15 bp, Homo sapiens
ctttctcagggacca

SEQ ID NO: 2124936 - DNA, 15 bp, Homo sapiens
tttctcagggaccat

SEQ ID NO: 2124937 - DNA, 15 bp, Homo sapiens
ttctcagggaccatt

SEQ ID NO: 2124938 - DNA, 15 bp, Homo sapiens
tctcagggaccattt

SEQ ID NO: 2124939 - DNA, 15 bp, Homo sapiens
ctcagggaccatttt

SEQ ID NO: 2124940 - DNA, 15 bp, Homo sapiens
tcagggaccattttt

SEQ ID NO: 2124941 - DNA, 15 bp, Homo sapiens
cagggaccatttttt

SEQ ID NO: 2124942 - DNA, 15 bp, Homo sapiens
agggaccattttttg

SEQ ID NO: 2124943 - DNA, 15 bp, Homo sapiens
gggaccattttttgt

SEQ ID NO: 2124944 - DNA, 15 bp, Homo sapiens
ggaccattttttgtt

SEQ ID NO: 2124945 - DNA, 15 bp, Homo sapiens
gaccattttttgtta

SEQ ID NO: 2124946 - DNA, 15 bp, Homo sapiens
accattttttgttaa

SEQ ID NO: 2124947 - DNA, 15 bp, Homo sapiens
ccattttttgttaat

SEQ ID NO: 2124948 - DNA, 15 bp, Homo sapiens
cattttttgttaatt

SEQ ID NO: 2124949 - DNA, 15 bp, Homo sapiens
attttttgttaatta

SEQ ID NO: 2124950 - DNA, 15 bp, Homo sapiens
ttttttgttaattac

SEQ ID NO: 2124951 - DNA, 15 bp, Homo sapiens
tttttgttaattacc

SEQ ID NO: 2124952 - DNA, 15 bp, Homo sapiens
ttttgttaattacct

SEQ ID NO: 2124953 - DNA, 15 bp, Homo sapiens
tttgttaattacctt

SEQ ID NO: 2124954 - DNA, 15 bp, Homo sapiens
ttgttaattaccttt

SEQ ID NO: 2124955 - DNA, 15 bp, Homo sapiens
tgttaattacctttt

SEQ ID NO: 2124956 - DNA, 15 bp, Homo sapiens
gttaattaccttttt

SEQ ID NO: 2124957 - DNA, 15 bp, Homo sapiens
ttaattacctttttt

SEQ ID NO: 2124958 - DNA, 15 bp, Homo sapiens
taattaccttttttt

SEQ ID NO: 2124959 - DNA, 15 bp, Homo sapiens
aattacctttttttc

SEQ ID NO: 2124960 - DNA, 15 bp, Homo sapiens
attacctttttttct

SEQ ID NO: 2124961 - DNA, 15 bp, Homo sapiens
ttacctttttttcta

SEQ ID NO: 2124962 - DNA, 15 bp, Homo sapiens
tacctttttttctat

SEQ ID NO: 2124963 - DNA, 15 bp, Homo sapiens
acctttttttctata

SEQ ID NO: 2124964 - DNA, 15 bp, Homo sapiens
cctttttttctatat

SEQ ID NO: 2124965 - DNA, 15 bp, Homo sapiens
ctttttttctatata

SEQ ID NO: 2124966 - DNA, 15 bp, Homo sapiens
tttttttctatatat

SEQ ID NO: 2124967 - DNA, 15 bp, Homo sapiens
ttttttctatatatt

SEQ ID NO: 2124968 - DNA, 15 bp, Homo sapiens
tttttctatatatta

SEQ ID NO: 2124969 - DNA, 15 bp, Homo sapiens
ttttctatatattag

SEQ ID NO: 2124970 - DNA, 15 bp, Homo sapiens
tttctatatattagc

SEQ ID NO: 2124971 - DNA, 15 bp, Homo sapiens
ttctatatattagct

SEQ ID NO: 2124972 - DNA, 15 bp, Homo sapiens
tctatatattagcta

SEQ ID NO: 2124973 - DNA, 15 bp, Homo sapiens
ctatatattagctat

SEQ ID NO: 2124974 - DNA, 15 bp, Homo sapiens
tatatattagctata

SEQ ID NO: 2124975 - DNA, 15 bp, Homo sapiens
atatattagctataa

SEQ ID NO: 2124976 - DNA, 15 bp, Homo sapiens
tatattagctataat

SEQ ID NO: 2124977 - DNA, 15 bp, Homo sapiens
atattagctataatt

SEQ ID NO: 2124978 - DNA, 15 bp, Homo sapiens
tattagctataattt

SEQ ID NO: 2124979 - DNA, 15 bp, Homo sapiens
attagctataatttc

SEQ ID NO: 2124980 - DNA, 15 bp, Homo sapiens
ttagctataatttcc

SEQ ID NO: 2124981 - DNA, 15 bp, Homo sapiens
tagctataatttcct

SEQ ID NO: 2124982 - DNA, 15 bp, Homo sapiens
agctataatttcctg

SEQ ID NO: 2124983 - DNA, 15 bp, Homo sapiens
gctataatttcctgt

SEQ ID NO: 2124984 - DNA, 15 bp, Homo sapiens
ctataatttcctgtt

SEQ ID NO: 2124985 - DNA, 15 bp, Homo sapiens
tataatttcctgttt

SEQ ID NO: 2124986 - DNA, 15 bp, Homo sapiens
ataatttcctgtttt

SEQ ID NO: 2124987 - DNA, 15 bp, Homo sapiens
taatttcctgttttt

SEQ ID NO: 2124988 - DNA, 15 bp, Homo sapiens
aatttcctgtttttt

SEQ ID NO: 2124989 - DNA, 15 bp, Homo sapiens
atttcctgttttttg

SEQ ID NO: 2124990 - DNA, 15 bp, Homo sapiens
tttcctgttttttgt

SEQ ID NO: 2124991 - DNA, 15 bp, Homo sapiens
ttcctgttttttgta

SEQ ID NO: 2124992 - DNA, 15 bp, Homo sapiens
tcctgttttttgtat

SEQ ID NO: 2124993 - DNA, 15 bp, Homo sapiens
cctgttttttgtatg

SEQ ID NO: 2124994 - DNA, 15 bp, Homo sapiens
ctgttttttgtatgc

SEQ ID NO: 2124995 - DNA, 15 bp, Homo sapiens
tgttttttgtatgcc

SEQ ID NO: 2124996 - DNA, 15 bp, Homo sapiens
gttttttgtatgcct

SEQ ID NO: 2124997 - DNA, 15 bp, Homo sapiens
ttttttgtatgcctt

SEQ ID NO: 2124998 - DNA, 15 bp, Homo sapiens
tttttgtatgccttg

SEQ ID NO: 2124999 - DNA, 15 bp, Homo sapiens
ttttgtatgccttgt

SEQ ID NO: 2125000 - DNA, 15 bp, Homo sapiens
tttgtatgccttgta

SEQ ID NO: 2125001 - DNA, 15 bp, Homo sapiens
ttgtatgccttgtaa

SEQ ID NO: 2125002 - DNA, 15 bp, Homo sapiens
tgtatgccttgtaat

SEQ ID NO: 2125003 - DNA, 15 bp, Homo sapiens
gtatgccttgtaatt

SEQ ID NO: 2125004 - DNA, 15 bp, Homo sapiens
tatgccttgtaattt

SEQ ID NO: 2125005 - DNA, 15 bp, Homo sapiens
atgccttgtaatttt

SEQ ID NO: 2125006 - DNA, 15 bp, Homo sapiens
tgccttgtaattttt

SEQ ID NO: 2125007 - DNA, 15 bp, Homo sapiens
gccttgtaatttttt

SEQ ID NO: 2125008 - DNA, 15 bp, Homo sapiens
ccttgtaatttttta

SEQ ID NO: 2125009 - DNA, 15 bp, Homo sapiens
cttgtaattttttaa

SEQ ID NO: 2125010 - DNA, 15 bp, Homo sapiens
ttgtaattttttaat

SEQ ID NO: 2125011 - DNA, 15 bp, Homo sapiens
tgtaattttttaata

SEQ ID NO: 2125012 - DNA, 15 bp, Homo sapiens
gtaattttttaataa

SEQ ID NO: 2125013 - DNA, 15 bp, Homo sapiens
aattttttaataaaa

SEQ ID NO: 2125014 - DNA, 15 bp, Homo sapiens
attttttaataaaaa

SEQ ID NO: 2125015 - DNA, 15 bp, Homo sapiens
ttttttaataaaaac

SEQ ID NO: 2125016 - DNA, 15 bp, Homo sapiens
tttttaataaaaact

SEQ ID NO: 2125017 - DNA, 15 bp, Homo sapiens
ttttaataaaaactg

SEQ ID NO: 2125018 - DNA, 15 bp, Homo sapiens
tttaataaaaactgc

SEQ ID NO: 2125019 - DNA, 15 bp, Homo sapiens
ttaataaaaactgca

SEQ ID NO: 2125020 - DNA, 15 bp, Homo sapiens
taataaaaactgcac

SEQ ID NO: 2125021 - DNA, 15 bp, Homo sapiens
aataaaaactgcaca

SEQ ID NO: 2125022 - DNA, 15 bp, Homo sapiens
ataaaaactgcacag

SEQ ID NO: 2125023 - DNA, 15 bp, Homo sapiens
taaaaactgcacagt

SEQ ID NO: 2125024 - DNA, 15 bp, Homo sapiens
aaaaactgcacagtt

SEQ ID NO: 2125025 - DNA, 15 bp, Homo sapiens
aaaactgcacagttt

SEQ ID NO: 2125026 - DNA, 15 bp, Homo sapiens
aaactgcacagtttt

SEQ ID NO: 2125027 - DNA, 15 bp, Homo sapiens
aactgcacagtttta

SEQ ID NO: 2125028 - DNA, 15 bp, Homo sapiens
actgcacagttttaa

SEQ ID NO: 2125029 - DNA, 15 bp, Homo sapiens
ctgcacagttttaat

SEQ ID NO: 2125030 - DNA, 15 bp, Homo sapiens
tgcacagttttaata

SEQ ID NO: 2125031 - DNA, 15 bp, Homo sapiens
gcacagttttaatat

SEQ ID NO: 2125032 - DNA, 15 bp, Homo sapiens
cacagttttaatatt

SEQ ID NO: 2125033 - DNA, 15 bp, Homo sapiens
acagttttaatatta

SEQ ID NO: 2125034 - DNA, 15 bp, Homo sapiens
cagttttaatattat

SEQ ID NO: 2125035 - DNA, 15 bp, Homo sapiens
agttttaatattata

SEQ ID NO: 2125036 - DNA, 15 bp, Homo sapiens
gttttaatattataa

SEQ ID NO: 2125037 - DNA, 15 bp, Homo sapiens
ttttaatattataat

SEQ ID NO: 2125038 - DNA, 15 bp, Homo sapiens
tttaatattataatg

SEQ ID NO: 2125039 - DNA, 15 bp, Homo sapiens
ttaatattataatgt

SEQ ID NO: 2125040 - DNA, 15 bp, Homo sapiens
taatattataatgtg

SEQ ID NO: 2125041 - DNA, 15 bp, Homo sapiens
aatattataatgtga

SEQ ID NO: 2125042 - DNA, 15 bp, Homo sapiens
atattataatgtgat

SEQ ID NO: 2125043 - DNA, 15 bp, Homo sapiens
tattataatgtgata

SEQ ID NO: 2125044 - DNA, 15 bp, Homo sapiens
attataatgtgatac

SEQ ID NO: 2125045 - DNA, 15 bp, Homo sapiens
ttataatgtgatacc

SEQ ID NO: 2125046 - DNA, 15 bp, Homo sapiens
tataatgtgatacct

SEQ ID NO: 2125047 - DNA, 15 bp, Homo sapiens
ataatgtgatacctt

SEQ ID NO: 2125048 - DNA, 15 bp, Homo sapiens
taatgtgataccttg

SEQ ID NO: 2125049 - DNA, 15 bp, Homo sapiens
aatgtgataccttgg

SEQ ID NO: 2125050 - DNA, 15 bp, Homo sapiens
atgtgataccttggg

SEQ ID NO: 2125051 - DNA, 15 bp, Homo sapiens
tgtgataccttggga

SEQ ID NO: 2125052 - DNA, 15 bp, Homo sapiens
gtgataccttgggaa

SEQ ID NO: 2125053 - DNA, 15 bp, Homo sapiens
tgataccttgggaaa

SEQ ID NO: 2125054 - DNA, 15 bp, Homo sapiens
gataccttgggaaat

SEQ ID NO: 2125055 - DNA, 15 bp, Homo sapiens
ataccttgggaaata

SEQ ID NO: 2125056 - DNA, 15 bp, Homo sapiens
taccttgggaaataa

SEQ ID NO: 2125057 - DNA, 15 bp, Homo sapiens
accttgggaaataaa

SEQ ID NO: 2125058 - DNA, 15 bp, Homo sapiens
ccttgggaaataaaa

SEQ ID NO: 2125059 - DNA, 15 bp, Homo sapiens
cttgggaaataaaat

SEQ ID NO: 2125060 - DNA, 15 bp, Homo sapiens
ttgggaaataaaatt

SEQ ID NO: 2125061 - DNA, 15 bp, Homo sapiens
tgggaaataaaattc

SEQ ID NO: 2125062 - DNA, 15 bp, Homo sapiens
gggaaataaaattcc

SEQ ID NO: 2125063 - DNA, 15 bp, Homo sapiens
ggaaataaaattcct

SEQ ID NO: 2125064 - DNA, 15 bp, Homo sapiens
gaaataaaattcctc

SEQ ID NO: 2125065 - DNA, 15 bp, Homo sapiens
aaataaaattcctcc

SEQ ID NO: 2125066 - DNA, 15 bp, Homo sapiens
aataaaattcctccc

SEQ ID NO: 2125067 - DNA, 15 bp, Homo sapiens
ataaaattcctccct

SEQ ID NO: 2125068 - DNA, 15 bp, Homo sapiens
taaaattcctccctc

SEQ ID NO: 2125069 - DNA, 15 bp, Homo sapiens
aaaattcctccctct

SEQ ID NO: 2125070 - DNA, 15 bp, Homo sapiens
aaattcctccctctc

SEQ ID NO: 2125071 - DNA, 15 bp, Homo sapiens
aattcctccctctcc

SEQ ID NO: 2125072 - DNA, 15 bp, Homo sapiens
attcctccctctccc

SEQ ID NO: 2125073 - DNA, 15 bp, Homo sapiens
ttcctccctctccct

SEQ ID NO: 2125074 - DNA, 15 bp, Homo sapiens
tcctccctctcccta

SEQ ID NO: 2125075 - DNA, 15 bp, Homo sapiens
cctccctctccctag

SEQ ID NO: 2125076 - DNA, 15 bp, Homo sapiens
ctccctctccctagt

SEQ ID NO: 2125077 - DNA, 15 bp, Homo sapiens
tccctctccctagtg

SEQ ID NO: 2125078 - DNA, 15 bp, Homo sapiens
ccctctccctagtgt

SEQ ID NO: 2125079 - DNA, 15 bp, Homo sapiens
cctctccctagtgtt

SEQ ID NO: 2125080 - DNA, 15 bp, Homo sapiens
ctctccctagtgttt

SEQ ID NO: 2125081 - DNA, 15 bp, Homo sapiens
tctccctagtgtttg

SEQ ID NO: 2125082 - DNA, 15 bp, Homo sapiens
ctccctagtgtttgc

SEQ ID NO: 2125083 - DNA, 15 bp, Homo sapiens
tccctagtgtttgct

SEQ ID NO: 2125084 - DNA, 15 bp, Homo sapiens
ccctagtgtttgctg

SEQ ID NO: 2125085 - DNA, 15 bp, Homo sapiens
cctagtgtttgctgg

SEQ ID NO: 2125086 - DNA, 15 bp, Homo sapiens
ctagtgtttgctggt

SEQ ID NO: 2125087 - DNA, 15 bp, Homo sapiens
tagtgtttgctggtg

SEQ ID NO: 2125088 - DNA, 15 bp, Homo sapiens
agtgtttgctggtga

SEQ ID NO: 2125089 - DNA, 15 bp, Homo sapiens
gtgtttgctggtgat

SEQ ID NO: 2125090 - DNA, 15 bp, Homo sapiens
tgtttgctggtgatt

SEQ ID NO: 2125091 - DNA, 15 bp, Homo sapiens
gtttgctggtgattt

SEQ ID NO: 2125092 - DNA, 15 bp, Homo sapiens
tttgctggtgatttt

SEQ ID NO: 2125093 - DNA, 15 bp, Homo sapiens
ttgctggtgattttt

SEQ ID NO: 2125094 - DNA, 15 bp, Homo sapiens
tgctggtgatttttt

SEQ ID NO: 2125095 - DNA, 15 bp, Homo sapiens
gctggtgattttttt

SEQ ID NO: 2125096 - DNA, 15 bp, Homo sapiens
ctggtgatttttttt

SEQ ID NO: 2125097 - DNA, 15 bp, Homo sapiens
tggtgattttttttt

SEQ ID NO: 2125098 - DNA, 15 bp, Homo sapiens
ggtgatttttttttt

SEQ ID NO: 2125099 - DNA, 15 bp, Homo sapiens
tggagtcttgctctg

SEQ ID NO: 2125100 - DNA, 15 bp, Homo sapiens
cttgctctgtcacca

SEQ ID NO: 2125101 - DNA, 15 bp, Homo sapiens
ttgctctgtcaccag

SEQ ID NO: 2125102 - DNA, 15 bp, Homo sapiens
tgctctgtcaccagg

SEQ ID NO: 2125103 - DNA, 15 bp, Homo sapiens
tctgtcaccaggctt

SEQ ID NO: 2125104 - DNA, 15 bp, Homo sapiens
ctgtcaccaggcttg

SEQ ID NO: 2125105 - DNA, 15 bp, Homo sapiens
tgtcaccaggcttgg

SEQ ID NO: 2125106 - DNA, 15 bp, Homo sapiens
gtcaccaggcttggc

SEQ ID NO: 2125107 - DNA, 15 bp, Homo sapiens
tcaccaggcttggcg

SEQ ID NO: 2125108 - DNA, 15 bp, Homo sapiens
caccaggcttggcgc

SEQ ID NO: 2125109 - DNA, 15 bp, Homo sapiens
accaggcttggcgcg

SEQ ID NO: 2125110 - DNA, 15 bp, Homo sapiens
ccaggcttggcgcgg

SEQ ID NO: 2125111 - DNA, 15 bp, Homo sapiens
caggcttggcgcggt

SEQ ID NO: 2125112 - DNA, 15 bp, Homo sapiens
aggcttggcgcggtc

SEQ ID NO: 2125113 - DNA, 15 bp, Homo sapiens
ggcttggcgcggtct

SEQ ID NO: 2125114 - DNA, 15 bp, Homo sapiens
gcttggcgcggtctc

SEQ ID NO: 2125115 - DNA, 15 bp, Homo sapiens
cttggcgcggtctca

SEQ ID NO: 2125116 - DNA, 15 bp, Homo sapiens
ttggcgcggtctcag

SEQ ID NO: 2125117 - DNA, 15 bp, Homo sapiens
tggcgcggtctcagc

SEQ ID NO: 2125118 - DNA, 15 bp, Homo sapiens
ggcgcggtctcagct

SEQ ID NO: 2125119 - DNA, 15 bp, Homo sapiens
gcgcggtctcagctc

SEQ ID NO: 2125120 - DNA, 15 bp, Homo sapiens
cgcggtctcagctca

SEQ ID NO: 2125121 - DNA, 15 bp, Homo sapiens
gcggtctcagctcac

SEQ ID NO: 2125122 - DNA, 15 bp, Homo sapiens
cggtctcagctcact

SEQ ID NO: 2125123 - DNA, 15 bp, Homo sapiens
ggtctcagctcactg

SEQ ID NO: 2125124 - DNA, 15 bp, Homo sapiens
gtctcagctcactgc

SEQ ID NO: 2125125 - DNA, 15 bp, Homo sapiens
tgcaacctccgcctt

SEQ ID NO: 2125126 - DNA, 15 bp, Homo sapiens
gcaacctccgccttc

SEQ ID NO: 2125127 - DNA, 15 bp, Homo sapiens
caacctccgccttcc

SEQ ID NO: 2125128 - DNA, 15 bp, Homo sapiens
aacctccgccttccg

SEQ ID NO: 2125129 - DNA, 15 bp, Homo sapiens
acctccgccttccgg

SEQ ID NO: 2125130 - DNA, 15 bp, Homo sapiens
cctccgccttccggg

SEQ ID NO: 2125131 - DNA, 15 bp, Homo sapiens
ctccgccttccgggt

SEQ ID NO: 2125132 - DNA, 15 bp, Homo sapiens
tccgccttccgggtt

SEQ ID NO: 2125133 - DNA, 15 bp, Homo sapiens
ccgccttccgggttc

SEQ ID NO: 2125134 - DNA, 15 bp, Homo sapiens
cgccttccgggttca

SEQ ID NO: 2125135 - DNA, 15 bp, Homo sapiens
gccttccgggttcaa

SEQ ID NO: 2125136 - DNA, 15 bp, Homo sapiens
ccttccgggttcaag

SEQ ID NO: 2125137 - DNA, 15 bp, Homo sapiens
cttccgggttcaagc

SEQ ID NO: 2125138 - DNA, 15 bp, Homo sapiens
ttccgggttcaagcg

SEQ ID NO: 2125139 - DNA, 15 bp, Homo sapiens
tccgggttcaagcga

SEQ ID NO: 2125140 - DNA, 15 bp, Homo sapiens
ggcgtgtgccaccat

SEQ ID NO: 2125141 - DNA, 15 bp, Homo sapiens
gcgtgtgccaccatg

SEQ ID NO: 2125142 - DNA, 15 bp, Homo sapiens
cgtgtgccaccatgt

SEQ ID NO: 2125143 - DNA, 15 bp, Homo sapiens
gtgtgccaccatgtg

SEQ ID NO: 2125144 - DNA, 15 bp, Homo sapiens
tgtgccaccatgtgc

SEQ ID NO: 2125145 - DNA, 15 bp, Homo sapiens
gtgccaccatgtgca

SEQ ID NO: 2125146 - DNA, 15 bp, Homo sapiens
tgccaccatgtgcag

SEQ ID NO: 2125147 - DNA, 15 bp, Homo sapiens
gccaccatgtgcagc

SEQ ID NO: 2125148 - DNA, 15 bp, Homo sapiens
ccaccatgtgcagct

SEQ ID NO: 2125149 - DNA, 15 bp, Homo sapiens
caccatgtgcagctt

SEQ ID NO: 2125150 - DNA, 15 bp, Homo sapiens
accatgtgcagctta

SEQ ID NO: 2125151 - DNA, 15 bp, Homo sapiens
ccatgtgcagcttat

SEQ ID NO: 2125152 - DNA, 15 bp, Homo sapiens
catgtgcagcttatt

SEQ ID NO: 2125153 - DNA, 15 bp, Homo sapiens
atgtgcagcttattt

SEQ ID NO: 2125154 - DNA, 15 bp, Homo sapiens
tgtgcagcttatttt

SEQ ID NO: 2125155 - DNA, 15 bp, Homo sapiens
gtgcagcttattttt

SEQ ID NO: 2125156 - DNA, 15 bp, Homo sapiens
tgcagcttatttttg

SEQ ID NO: 2125157 - DNA, 15 bp, Homo sapiens
gcagcttatttttgt

SEQ ID NO: 2125158 - DNA, 15 bp, Homo sapiens
cagcttatttttgta

SEQ ID NO: 2125159 - DNA, 15 bp, Homo sapiens
agcttatttttgtat

SEQ ID NO: 2125160 - DNA, 15 bp, Homo sapiens
gcttatttttgtatt

SEQ ID NO: 2125161 - DNA, 15 bp, Homo sapiens
cttatttttgtattt

SEQ ID NO: 2125162 - DNA, 15 bp, Homo sapiens
ttatttttgtattta

SEQ ID NO: 2125163 - DNA, 15 bp, Homo sapiens
tatttttgtatttat

SEQ ID NO: 2125164 - DNA, 15 bp, Homo sapiens
atttttgtatttata

SEQ ID NO: 2125165 - DNA, 15 bp, Homo sapiens
ttttgtatttatagt

SEQ ID NO: 2125166 - DNA, 15 bp, Homo sapiens
tttgtatttatagta

SEQ ID NO: 2125167 - DNA, 15 bp, Homo sapiens
ttgtatttatagtag

SEQ ID NO: 2125168 - DNA, 15 bp, Homo sapiens
tgtatttatagtaga

SEQ ID NO: 2125169 - DNA, 15 bp, Homo sapiens
gtatttatagtagag

SEQ ID NO: 2125170 - DNA, 15 bp, Homo sapiens
tatttatagtagaga

SEQ ID NO: 2125171 - DNA, 15 bp, Homo sapiens
atttatagtagagat

SEQ ID NO: 2125172 - DNA, 15 bp, Homo sapiens
tttatagtagagatg

SEQ ID NO: 2125173 - DNA, 15 bp, Homo sapiens
ttatagtagagatgg

SEQ ID NO: 2125174 - DNA, 15 bp, Homo sapiens
tatagtagagatggg

SEQ ID NO: 2125175 - DNA, 15 bp, Homo sapiens
atagtagagatgggg

SEQ ID NO: 2125176 - DNA, 15 bp, Homo sapiens
tggggtttcaccata

SEQ ID NO: 2125177 - DNA, 15 bp, Homo sapiens
ccatattgaccagga

SEQ ID NO: 2125178 - DNA, 15 bp, Homo sapiens
catattgaccaggat

SEQ ID NO: 2125179 - DNA, 15 bp, Homo sapiens
atattgaccaggatg

SEQ ID NO: 2125180 - DNA, 15 bp, Homo sapiens
tattgaccaggatgg

SEQ ID NO: 2125181 - DNA, 15 bp, Homo sapiens
attgaccaggatggt

SEQ ID NO: 2125182 - DNA, 15 bp, Homo sapiens
ttgaccaggatggtc

SEQ ID NO: 2125183 - DNA, 15 bp, Homo sapiens
tgaccaggatggtct

SEQ ID NO: 2125184 - DNA, 15 bp, Homo sapiens
gaccaggatggtctt

SEQ ID NO: 2125185 - DNA, 15 bp, Homo sapiens
accaggatggtcttg

SEQ ID NO: 2125186 - DNA, 15 bp, Homo sapiens
aggatggtcttgatt

SEQ ID NO: 2125187 - DNA, 15 bp, Homo sapiens
ggatggtcttgattt

SEQ ID NO: 2125188 - DNA, 15 bp, Homo sapiens
gatggtcttgatttc

SEQ ID NO: 2125189 - DNA, 15 bp, Homo sapiens
atggtcttgatttcc

SEQ ID NO: 2125190 - DNA, 15 bp, Homo sapiens
tggtcttgatttcct

SEQ ID NO: 2125191 - DNA, 15 bp, Homo sapiens
ggtcttgatttcctg

SEQ ID NO: 2125192 - DNA, 15 bp, Homo sapiens
gtcttgatttcctga

SEQ ID NO: 2125193 - DNA, 15 bp, Homo sapiens
tcttgatttcctgac

SEQ ID NO: 2125194 - DNA, 15 bp, Homo sapiens
cttgatttcctgacc

SEQ ID NO: 2125195 - DNA, 15 bp, Homo sapiens
ttgatttcctgacct

SEQ ID NO: 2125196 - DNA, 15 bp, Homo sapiens
tgatttcctgacctc

SEQ ID NO: 2125197 - DNA, 15 bp, Homo sapiens
gatttcctgacctca

SEQ ID NO: 2125198 - DNA, 15 bp, Homo sapiens
atttcctgacctcat

SEQ ID NO: 2125199 - DNA, 15 bp, Homo sapiens
tttcctgacctcatg

SEQ ID NO: 2125200 - DNA, 15 bp, Homo sapiens
ttcctgacctcatga

SEQ ID NO: 2125201 - DNA, 15 bp, Homo sapiens
ctgacctcatgatct

SEQ ID NO: 2125202 - DNA, 15 bp, Homo sapiens
tgacctcatgatctg

SEQ ID NO: 2125203 - DNA, 15 bp, Homo sapiens
gacctcatgatctgt

SEQ ID NO: 2125204 - DNA, 15 bp, Homo sapiens
acctcatgatctgtc

SEQ ID NO: 2125205 - DNA, 15 bp, Homo sapiens
cctcatgatctgtct

SEQ ID NO: 2125206 - DNA, 15 bp, Homo sapiens
ctcatgatctgtctg

SEQ ID NO: 2125207 - DNA, 15 bp, Homo sapiens
tcatgatctgtctgc

SEQ ID NO: 2125208 - DNA, 15 bp, Homo sapiens
catgatctgtctgcc

SEQ ID NO: 2125209 - DNA, 15 bp, Homo sapiens
atgatctgtctgcct

SEQ ID NO: 2125210 - DNA, 15 bp, Homo sapiens
tgatctgtctgcctc

SEQ ID NO: 2125211 - DNA, 15 bp, Homo sapiens
gatctgtctgcctcg

SEQ ID NO: 2125212 - DNA, 15 bp, Homo sapiens
atctgtctgcctcgg

SEQ ID NO: 2125213 - DNA, 15 bp, Homo sapiens
tctgtctgcctcggc

SEQ ID NO: 2125214 - DNA, 15 bp, Homo sapiens
ctgtctgcctcggcc

SEQ ID NO: 2125215 - DNA, 15 bp, Homo sapiens
tgtctgcctcggcct

SEQ ID NO: 2125216 - DNA, 15 bp, Homo sapiens
gtctgcctcggcctc

SEQ ID NO: 2125217 - DNA, 15 bp, Homo sapiens
tctgcctcggcctcc

SEQ ID NO: 2125218 - DNA, 15 bp, Homo sapiens
tgagccaccgcaccc

SEQ ID NO: 2125219 - DNA, 15 bp, Homo sapiens
gagccaccgcacccg

SEQ ID NO: 2125220 - DNA, 15 bp, Homo sapiens
agccaccgcacccgg

SEQ ID NO: 2125221 - DNA, 15 bp, Homo sapiens
gccaccgcacccggc

SEQ ID NO: 2125222 - DNA, 15 bp, Homo sapiens
ccaccgcacccggcc

SEQ ID NO: 2125223 - DNA, 15 bp, Homo sapiens
accgcacccggccac

SEQ ID NO: 2125224 - DNA, 15 bp, Homo sapiens
ccgcacccggccact

SEQ ID NO: 2125225 - DNA, 15 bp, Homo sapiens
cgcacccggccactg

SEQ ID NO: 2125226 - DNA, 15 bp, Homo sapiens
gcacccggccactgg

SEQ ID NO: 2125227 - DNA, 15 bp, Homo sapiens
cacccggccactggt

SEQ ID NO: 2125228 - DNA, 15 bp, Homo sapiens
acccggccactggtg

SEQ ID NO: 2125229 - DNA, 15 bp, Homo sapiens
cccggccactggtga

SEQ ID NO: 2125230 - DNA, 15 bp, Homo sapiens
ccggccactggtgat

SEQ ID NO: 2125231 - DNA, 15 bp, Homo sapiens
cggccactggtgatg

SEQ ID NO: 2125232 - DNA, 15 bp, Homo sapiens
ggccactggtgatgt

SEQ ID NO: 2125233 - DNA, 15 bp, Homo sapiens
gccactggtgatgtt

SEQ ID NO: 2125234 - DNA, 15 bp, Homo sapiens
ccactggtgatgttt

SEQ ID NO: 2125235 - DNA, 15 bp, Homo sapiens
cactggtgatgtttt

SEQ ID NO: 2125236 - DNA, 15 bp, Homo sapiens
actggtgatgttttt

SEQ ID NO: 2125237 - DNA, 15 bp, Homo sapiens
ctggtgatgttttta

SEQ ID NO: 2125238 - DNA, 15 bp, Homo sapiens
tggtgatgtttttaa

SEQ ID NO: 2125239 - DNA, 15 bp, Homo sapiens
ggtgatgtttttaat

SEQ ID NO: 2125240 - DNA, 15 bp, Homo sapiens
gtgatgtttttaata

SEQ ID NO: 2125241 - DNA, 15 bp, Homo sapiens
tgatgtttttaatag

SEQ ID NO: 2125242 - DNA, 15 bp, Homo sapiens
gatgtttttaataga

SEQ ID NO: 2125243 - DNA, 15 bp, Homo sapiens
atgtttttaatagat

SEQ ID NO: 2125244 - DNA, 15 bp, Homo sapiens
tgtttttaatagatt

SEQ ID NO: 2125245 - DNA, 15 bp, Homo sapiens
gtttttaatagattg

SEQ ID NO: 2125246 - DNA, 15 bp, Homo sapiens
tttttaatagattgt

SEQ ID NO: 2125247 - DNA, 15 bp, Homo sapiens
ttttaatagattgta

SEQ ID NO: 2125248 - DNA, 15 bp, Homo sapiens
tttaatagattgtaa

SEQ ID NO: 2125249 - DNA, 15 bp, Homo sapiens
ttaatagattgtaat

SEQ ID NO: 2125250 - DNA, 15 bp, Homo sapiens
taatagattgtaatt

SEQ ID NO: 2125251 - DNA, 15 bp, Homo sapiens
aatagattgtaattt

SEQ ID NO: 2125252 - DNA, 15 bp, Homo sapiens
atagattgtaatttt

SEQ ID NO: 2125253 - DNA, 15 bp, Homo sapiens
tagattgtaattttt

SEQ ID NO: 2125254 - DNA, 15 bp, Homo sapiens
agattgtaatttttt

SEQ ID NO: 2125255 - DNA, 15 bp, Homo sapiens
gattgtaattttttt

SEQ ID NO: 2125256 - DNA, 15 bp, Homo sapiens
attgtaatttttttt

SEQ ID NO: 2125257 - DNA, 15 bp, Homo sapiens
ttgtaattttttttg

SEQ ID NO: 2125258 - DNA, 15 bp, Homo sapiens
tgtaattttttttga

SEQ ID NO: 2125259 - DNA, 15 bp, Homo sapiens
gtaattttttttgag

SEQ ID NO: 2125260 - DNA, 15 bp, Homo sapiens
taattttttttgagg

SEQ ID NO: 2125261 - DNA, 15 bp, Homo sapiens
aattttttttgaggt

SEQ ID NO: 2125262 - DNA, 15 bp, Homo sapiens
attttttttgaggta

SEQ ID NO: 2125263 - DNA, 15 bp, Homo sapiens
ttttttttgaggtag

SEQ ID NO: 2125264 - DNA, 15 bp, Homo sapiens
tttttttgaggtagc

SEQ ID NO: 2125265 - DNA, 15 bp, Homo sapiens
ttttttgaggtagcg

SEQ ID NO: 2125266 - DNA, 15 bp, Homo sapiens
tttttgaggtagcgt

SEQ ID NO: 2125267 - DNA, 15 bp, Homo sapiens
ttttgaggtagcgtt

SEQ ID NO: 2125268 - DNA, 15 bp, Homo sapiens
tttgaggtagcgttt

SEQ ID NO: 2125269 - DNA, 15 bp, Homo sapiens
ttgaggtagcgtttg

SEQ ID NO: 2125270 - DNA, 15 bp, Homo sapiens
tgaggtagcgtttgc

SEQ ID NO: 2125271 - DNA, 15 bp, Homo sapiens
gaggtagcgtttgct

SEQ ID NO: 2125272 - DNA, 15 bp, Homo sapiens
aggtagcgtttgctt

SEQ ID NO: 2125273 - DNA, 15 bp, Homo sapiens
ggtagcgtttgcttt

SEQ ID NO: 2125274 - DNA, 15 bp, Homo sapiens
gtagcgtttgctttc

SEQ ID NO: 2125275 - DNA, 15 bp, Homo sapiens
tagcgtttgctttct

SEQ ID NO: 2125276 - DNA, 15 bp, Homo sapiens
agcgtttgctttctc

SEQ ID NO: 2125277 - DNA, 15 bp, Homo sapiens
gcgtttgctttctca

SEQ ID NO: 2125278 - DNA, 15 bp, Homo sapiens
cgtttgctttctcac

SEQ ID NO: 2125279 - DNA, 15 bp, Homo sapiens
gtttgctttctcacc

SEQ ID NO: 2125280 - DNA, 15 bp, Homo sapiens
tttgctttctcaccc

SEQ ID NO: 2125281 - DNA, 15 bp, Homo sapiens
ttgctttctcaccca

SEQ ID NO: 2125282 - DNA, 15 bp, Homo sapiens
tgctttctcacccag

SEQ ID NO: 2125283 - DNA, 15 bp, Homo sapiens
gctttctcacccagt

SEQ ID NO: 2125284 - DNA, 15 bp, Homo sapiens
ctttctcacccagtc

SEQ ID NO: 2125285 - DNA, 15 bp, Homo sapiens
tttctcacccagtct

SEQ ID NO: 2125286 - DNA, 15 bp, Homo sapiens
ttctcacccagtctg

SEQ ID NO: 2125287 - DNA, 15 bp, Homo sapiens
tctcacccagtctgg

SEQ ID NO: 2125288 - DNA, 15 bp, Homo sapiens
ctcacccagtctgga

SEQ ID NO: 2125289 - DNA, 15 bp, Homo sapiens
tcacccagtctggag

SEQ ID NO: 2125290 - DNA, 15 bp, Homo sapiens
cacccagtctggagt

SEQ ID NO: 2125291 - DNA, 15 bp, Homo sapiens
acccagtctggagtt

SEQ ID NO: 2125292 - DNA, 15 bp, Homo sapiens
cccagtctggagttc

SEQ ID NO: 2125293 - DNA, 15 bp, Homo sapiens
ccagtctggagttca

SEQ ID NO: 2125294 - DNA, 15 bp, Homo sapiens
cagtctggagttcag

SEQ ID NO: 2125295 - DNA, 15 bp, Homo sapiens
agtctggagttcagt

SEQ ID NO: 2125296 - DNA, 15 bp, Homo sapiens
gtctggagttcagtg

SEQ ID NO: 2125297 - DNA, 15 bp, Homo sapiens
tctggagttcagtgg

SEQ ID NO: 2125298 - DNA, 15 bp, Homo sapiens
ctggagttcagtggg

SEQ ID NO: 2125299 - DNA, 15 bp, Homo sapiens
tggagttcagtgggg

SEQ ID NO: 2125300 - DNA, 15 bp, Homo sapiens
ggagttcagtggggc

SEQ ID NO: 2125301 - DNA, 15 bp, Homo sapiens
gagttcagtggggca

SEQ ID NO: 2125302 - DNA, 15 bp, Homo sapiens
agttcagtggggcaa

SEQ ID NO: 2125303 - DNA, 15 bp, Homo sapiens
gttcagtggggcaat

SEQ ID NO: 2125304 - DNA, 15 bp, Homo sapiens
ttcagtggggcaatc

SEQ ID NO: 2125305 - DNA, 15 bp, Homo sapiens
tcagtggggcaatca

SEQ ID NO: 2125306 - DNA, 15 bp, Homo sapiens
cagtggggcaatcac

SEQ ID NO: 2125307 - DNA, 15 bp, Homo sapiens
agtggggcaatcaca

SEQ ID NO: 2125308 - DNA, 15 bp, Homo sapiens
gtggggcaatcacag

SEQ ID NO: 2125309 - DNA, 15 bp, Homo sapiens
tggggcaatcacagc

SEQ ID NO: 2125310 - DNA, 15 bp, Homo sapiens
ggggcaatcacagcc

SEQ ID NO: 2125311 - DNA, 15 bp, Homo sapiens
gggcaatcacagccc

SEQ ID NO: 2125312 - DNA, 15 bp, Homo sapiens
ggcaatcacagccca

SEQ ID NO: 2125313 - DNA, 15 bp, Homo sapiens
atcacagcccactgt

SEQ ID NO: 2125314 - DNA, 15 bp, Homo sapiens
tcacagcccactgta

SEQ ID NO: 2125315 - DNA, 15 bp, Homo sapiens
cacagcccactgtat

SEQ ID NO: 2125316 - DNA, 15 bp, Homo sapiens
acagcccactgtatc

SEQ ID NO: 2125317 - DNA, 15 bp, Homo sapiens
cagcccactgtatcc

SEQ ID NO: 2125318 - DNA, 15 bp, Homo sapiens
agcccactgtatcct

SEQ ID NO: 2125319 - DNA, 15 bp, Homo sapiens
gcccactgtatcctt

SEQ ID NO: 2125320 - DNA, 15 bp, Homo sapiens
cccactgtatccttg

SEQ ID NO: 2125321 - DNA, 15 bp, Homo sapiens
ccactgtatccttga

SEQ ID NO: 2125322 - DNA, 15 bp, Homo sapiens
cactgtatccttgaa

SEQ ID NO: 2125323 - DNA, 15 bp, Homo sapiens
actgtatccttgaac

SEQ ID NO: 2125324 - DNA, 15 bp, Homo sapiens
ctgtatccttgaact

SEQ ID NO: 2125325 - DNA, 15 bp, Homo sapiens
tgtatccttgaacta

SEQ ID NO: 2125326 - DNA, 15 bp, Homo sapiens
gtatccttgaactac

SEQ ID NO: 2125327 - DNA, 15 bp, Homo sapiens
tatccttgaactact

SEQ ID NO: 2125328 - DNA, 15 bp, Homo sapiens
atccttgaactactg

SEQ ID NO: 2125329 - DNA, 15 bp, Homo sapiens
tccttgaactactgg

SEQ ID NO: 2125330 - DNA, 15 bp, Homo sapiens
ccttgaactactggg

SEQ ID NO: 2125331 - DNA, 15 bp, Homo sapiens
cttgaactactgggc

SEQ ID NO: 2125332 - DNA, 15 bp, Homo sapiens
ttgaactactgggct

SEQ ID NO: 2125333 - DNA, 15 bp, Homo sapiens
tgaactactgggctc

SEQ ID NO: 2125334 - DNA, 15 bp, Homo sapiens
gaactactgggctca

SEQ ID NO: 2125335 - DNA, 15 bp, Homo sapiens
aactactgggctcaa

SEQ ID NO: 2125336 - DNA, 15 bp, Homo sapiens
actactgggctcaat

SEQ ID NO: 2125337 - DNA, 15 bp, Homo sapiens
ctactgggctcaatc

SEQ ID NO: 2125338 - DNA, 15 bp, Homo sapiens
tactgggctcaatca

SEQ ID NO: 2125339 - DNA, 15 bp, Homo sapiens
actgggctcaatcaa

SEQ ID NO: 2125340 - DNA, 15 bp, Homo sapiens
ctgggctcaatcaat

SEQ ID NO: 2125341 - DNA, 15 bp, Homo sapiens
tgggctcaatcaatc

SEQ ID NO: 2125342 - DNA, 15 bp, Homo sapiens
gggctcaatcaatcc

SEQ ID NO: 2125343 - DNA, 15 bp, Homo sapiens
ggctcaatcaatcct

SEQ ID NO: 2125344 - DNA, 15 bp, Homo sapiens
gctcaatcaatcctc

SEQ ID NO: 2125345 - DNA, 15 bp, Homo sapiens
ctcaatcaatcctcc

SEQ ID NO: 2125346 - DNA, 15 bp, Homo sapiens
tcaatcaatcctcct

SEQ ID NO: 2125347 - DNA, 15 bp, Homo sapiens
caatcaatcctcctg

SEQ ID NO: 2125348 - DNA, 15 bp, Homo sapiens
aatcaatcctcctgc

SEQ ID NO: 2125349 - DNA, 15 bp, Homo sapiens
atcaatcctcctgct

SEQ ID NO: 2125350 - DNA, 15 bp, Homo sapiens
tcaatcctcctgctt

SEQ ID NO: 2125351 - DNA, 15 bp, Homo sapiens
caatcctcctgcttc

SEQ ID NO: 2125352 - DNA, 15 bp, Homo sapiens
aatcctcctgcttca

SEQ ID NO: 2125353 - DNA, 15 bp, Homo sapiens
atcctcctgcttcat

SEQ ID NO: 2125354 - DNA, 15 bp, Homo sapiens
tcctcctgcttcatc

SEQ ID NO: 2125355 - DNA, 15 bp, Homo sapiens
cctcctgcttcatcc

SEQ ID NO: 2125356 - DNA, 15 bp, Homo sapiens
ctcctgcttcatcct

SEQ ID NO: 2125357 - DNA, 15 bp, Homo sapiens
tcctgcttcatcctc

SEQ ID NO: 2125358 - DNA, 15 bp, Homo sapiens
cctgcttcatcctcc

SEQ ID NO: 2125359 - DNA, 15 bp, Homo sapiens
ctgcttcatcctcct

SEQ ID NO: 2125360 - DNA, 15 bp, Homo sapiens
tgcttcatcctcctg

SEQ ID NO: 2125361 - DNA, 15 bp, Homo sapiens
gcttcatcctcctga

SEQ ID NO: 2125362 - DNA, 15 bp, Homo sapiens
cttcatcctcctgag

SEQ ID NO: 2125363 - DNA, 15 bp, Homo sapiens
ttcatcctcctgaga

SEQ ID NO: 2125364 - DNA, 15 bp, Homo sapiens
tcatcctcctgagaa

SEQ ID NO: 2125365 - DNA, 15 bp, Homo sapiens
catcctcctgagaag

SEQ ID NO: 2125366 - DNA, 15 bp, Homo sapiens
atcctcctgagaagc

SEQ ID NO: 2125367 - DNA, 15 bp, Homo sapiens
tcctcctgagaagct

SEQ ID NO: 2125368 - DNA, 15 bp, Homo sapiens
cctcctgagaagcta

SEQ ID NO: 2125369 - DNA, 15 bp, Homo sapiens
ctcctgagaagctag

SEQ ID NO: 2125370 - DNA, 15 bp, Homo sapiens
tcctgagaagctaga

SEQ ID NO: 2125371 - DNA, 15 bp, Homo sapiens
cctgagaagctagaa

SEQ ID NO: 2125372 - DNA, 15 bp, Homo sapiens
ctgagaagctagaac

SEQ ID NO: 2125373 - DNA, 15 bp, Homo sapiens
tgagaagctagaact

SEQ ID NO: 2125374 - DNA, 15 bp, Homo sapiens
gagaagctagaacta

SEQ ID NO: 2125375 - DNA, 15 bp, Homo sapiens
agaagctagaactac

SEQ ID NO: 2125376 - DNA, 15 bp, Homo sapiens
gaagctagaactacg

SEQ ID NO: 2125377 - DNA, 15 bp, Homo sapiens
aagctagaactacgg

SEQ ID NO: 2125378 - DNA, 15 bp, Homo sapiens
agctagaactacggg

SEQ ID NO: 2125379 - DNA, 15 bp, Homo sapiens
gctagaactacgggt

SEQ ID NO: 2125380 - DNA, 15 bp, Homo sapiens
ctagaactacgggta

SEQ ID NO: 2125381 - DNA, 15 bp, Homo sapiens
tagaactacgggtat

SEQ ID NO: 2125382 - DNA, 15 bp, Homo sapiens
agaactacgggtatg

SEQ ID NO: 2125383 - DNA, 15 bp, Homo sapiens
gaactacgggtatgc

SEQ ID NO: 2125384 - DNA, 15 bp, Homo sapiens
aactacgggtatgca

SEQ ID NO: 2125385 - DNA, 15 bp, Homo sapiens
actacgggtatgcac

SEQ ID NO: 2125386 - DNA, 15 bp, Homo sapiens
ctacgggtatgcacc

SEQ ID NO: 2125387 - DNA, 15 bp, Homo sapiens
tacgggtatgcacca

SEQ ID NO: 2125388 - DNA, 15 bp, Homo sapiens
acgggtatgcaccac

SEQ ID NO: 2125389 - DNA, 15 bp, Homo sapiens
cgggtatgcaccacc

SEQ ID NO: 2125390 - DNA, 15 bp, Homo sapiens
gggtatgcaccacca

SEQ ID NO: 2125391 - DNA, 15 bp, Homo sapiens
ggtatgcaccaccac

SEQ ID NO: 2125392 - DNA, 15 bp, Homo sapiens
gtatgcaccaccacg

SEQ ID NO: 2125393 - DNA, 15 bp, Homo sapiens
tatgcaccaccacgc

SEQ ID NO: 2125394 - DNA, 15 bp, Homo sapiens
tttttatatttttta

SEQ ID NO: 2125395 - DNA, 15 bp, Homo sapiens
ttttatattttttat

SEQ ID NO: 2125396 - DNA, 15 bp, Homo sapiens
tttatattttttatt

SEQ ID NO: 2125397 - DNA, 15 bp, Homo sapiens
ttatattttttattt

SEQ ID NO: 2125398 - DNA, 15 bp, Homo sapiens
tatattttttatttt

SEQ ID NO: 2125399 - DNA, 15 bp, Homo sapiens
atattttttattttt

SEQ ID NO: 2125400 - DNA, 15 bp, Homo sapiens
tattttttatttttg

SEQ ID NO: 2125401 - DNA, 15 bp, Homo sapiens
attttttatttttgt

SEQ ID NO: 2125402 - DNA, 15 bp, Homo sapiens
ttttttatttttgta

SEQ ID NO: 2125403 - DNA, 15 bp, Homo sapiens
tttttatttttgtag

SEQ ID NO: 2125404 - DNA, 15 bp, Homo sapiens
ttttatttttgtaga

SEQ ID NO: 2125405 - DNA, 15 bp, Homo sapiens
tttatttttgtagag

SEQ ID NO: 2125406 - DNA, 15 bp, Homo sapiens
ttatttttgtagaga

SEQ ID NO: 2125407 - DNA, 15 bp, Homo sapiens
tatttttgtagagac

SEQ ID NO: 2125408 - DNA, 15 bp, Homo sapiens
atttttgtagagaca

SEQ ID NO: 2125409 - DNA, 15 bp, Homo sapiens
ttgtagagacagagg

SEQ ID NO: 2125410 - DNA, 15 bp, Homo sapiens
tgtagagacagaggt

SEQ ID NO: 2125411 - DNA, 15 bp, Homo sapiens
gtagagacagaggtc

SEQ ID NO: 2125412 - DNA, 15 bp, Homo sapiens
tagagacagaggtct

SEQ ID NO: 2125413 - DNA, 15 bp, Homo sapiens
agagacagaggtctc

SEQ ID NO: 2125414 - DNA, 15 bp, Homo sapiens
gagacagaggtctct

SEQ ID NO: 2125415 - DNA, 15 bp, Homo sapiens
agacagaggtctctc

SEQ ID NO: 2125416 - DNA, 15 bp, Homo sapiens
gacagaggtctctct

SEQ ID NO: 2125417 - DNA, 15 bp, Homo sapiens
acagaggtctctcta

SEQ ID NO: 2125418 - DNA, 15 bp, Homo sapiens
cagaggtctctctat

SEQ ID NO: 2125419 - DNA, 15 bp, Homo sapiens
agaggtctctctatt

SEQ ID NO: 2125420 - DNA, 15 bp, Homo sapiens
gaggtctctctattt

SEQ ID NO: 2125421 - DNA, 15 bp, Homo sapiens
aggtctctctatttt

SEQ ID NO: 2125422 - DNA, 15 bp, Homo sapiens
ggtctctctattttg

SEQ ID NO: 2125423 - DNA, 15 bp, Homo sapiens
gtctctctattttgc

SEQ ID NO: 2125424 - DNA, 15 bp, Homo sapiens
tctctctattttgcc

SEQ ID NO: 2125425 - DNA, 15 bp, Homo sapiens
ctctctattttgccc

SEQ ID NO: 2125426 - DNA, 15 bp, Homo sapiens
tctctattttgccca

SEQ ID NO: 2125427 - DNA, 15 bp, Homo sapiens
ctctattttgcccag

SEQ ID NO: 2125428 - DNA, 15 bp, Homo sapiens
tctattttgcccagg

SEQ ID NO: 2125429 - DNA, 15 bp, Homo sapiens
ctattttgcccaggc

SEQ ID NO: 2125430 - DNA, 15 bp, Homo sapiens
tattttgcccaggct

SEQ ID NO: 2125431 - DNA, 15 bp, Homo sapiens
attttgcccaggctg

SEQ ID NO: 2125432 - DNA, 15 bp, Homo sapiens
ttttgcccaggctga

SEQ ID NO: 2125433 - DNA, 15 bp, Homo sapiens
tttgcccaggctgat

SEQ ID NO: 2125434 - DNA, 15 bp, Homo sapiens
cccaggctgatctcg

SEQ ID NO: 2125435 - DNA, 15 bp, Homo sapiens
ctgatctcgaactcc

SEQ ID NO: 2125436 - DNA, 15 bp, Homo sapiens
tgatctcgaactcct

SEQ ID NO: 2125437 - DNA, 15 bp, Homo sapiens
gatctcgaactcctg

SEQ ID NO: 2125438 - DNA, 15 bp, Homo sapiens
atctcgaactcctgg

SEQ ID NO: 2125439 - DNA, 15 bp, Homo sapiens
tctcgaactcctggc

SEQ ID NO: 2125440 - DNA, 15 bp, Homo sapiens
ctcgaactcctggcc

SEQ ID NO: 2125441 - DNA, 15 bp, Homo sapiens
tcgaactcctggcct

SEQ ID NO: 2125442 - DNA, 15 bp, Homo sapiens
cgaactcctggcctc

SEQ ID NO: 2125443 - DNA, 15 bp, Homo sapiens
ctcctggcctcaaaa

SEQ ID NO: 2125444 - DNA, 15 bp, Homo sapiens
tcctggcctcaaaag

SEQ ID NO: 2125445 - DNA, 15 bp, Homo sapiens
cctggcctcaaaaga

SEQ ID NO: 2125446 - DNA, 15 bp, Homo sapiens
ctggcctcaaaagat

SEQ ID NO: 2125447 - DNA, 15 bp, Homo sapiens
tggcctcaaaagatc

SEQ ID NO: 2125448 - DNA, 15 bp, Homo sapiens
ggcctcaaaagatcc

SEQ ID NO: 2125449 - DNA, 15 bp, Homo sapiens
gcctcaaaagatcct

SEQ ID NO: 2125450 - DNA, 15 bp, Homo sapiens
cctcaaaagatcctc

SEQ ID NO: 2125451 - DNA, 15 bp, Homo sapiens
ctcaaaagatcctcc

SEQ ID NO: 2125452 - DNA, 15 bp, Homo sapiens
tcaaaagatcctcct

SEQ ID NO: 2125453 - DNA, 15 bp, Homo sapiens
caaaagatcctcctg

SEQ ID NO: 2125454 - DNA, 15 bp, Homo sapiens
aaaagatcctcctgc

SEQ ID NO: 2125455 - DNA, 15 bp, Homo sapiens
aaagatcctcctgcc

SEQ ID NO: 2125456 - DNA, 15 bp, Homo sapiens
aagatcctcctgcct

SEQ ID NO: 2125457 - DNA, 15 bp, Homo sapiens
agatcctcctgcctt

SEQ ID NO: 2125458 - DNA, 15 bp, Homo sapiens
ctgccttggcctcct

SEQ ID NO: 2125459 - DNA, 15 bp, Homo sapiens
tgccttggcctccta

SEQ ID NO: 2125460 - DNA, 15 bp, Homo sapiens
gccttggcctcctaa

SEQ ID NO: 2125461 - DNA, 15 bp, Homo sapiens
ccttggcctcctaaa

SEQ ID NO: 2125462 - DNA, 15 bp, Homo sapiens
cttggcctcctaaag

SEQ ID NO: 2125463 - DNA, 15 bp, Homo sapiens
ttggcctcctaaagt

SEQ ID NO: 2125464 - DNA, 15 bp, Homo sapiens
tggcctcctaaagtg

SEQ ID NO: 2125465 - DNA, 15 bp, Homo sapiens
ctcctaaagtgctga

SEQ ID NO: 2125466 - DNA, 15 bp, Homo sapiens
tcctaaagtgctgag

SEQ ID NO: 2125467 - DNA, 15 bp, Homo sapiens
cctaaagtgctgaga

SEQ ID NO: 2125468 - DNA, 15 bp, Homo sapiens
ctaaagtgctgagat

SEQ ID NO: 2125469 - DNA, 15 bp, Homo sapiens
taaagtgctgagatt

SEQ ID NO: 2125470 - DNA, 15 bp, Homo sapiens
aagtgctgagattaa

SEQ ID NO: 2125471 - DNA, 15 bp, Homo sapiens
agtgctgagattaaa

SEQ ID NO: 2125472 - DNA, 15 bp, Homo sapiens
gtgctgagattaaag

SEQ ID NO: 2125473 - DNA, 15 bp, Homo sapiens
tgctgagattaaagg

SEQ ID NO: 2125474 - DNA, 15 bp, Homo sapiens
gctgagattaaaggt

SEQ ID NO: 2125475 - DNA, 15 bp, Homo sapiens
ctgagattaaaggtg

SEQ ID NO: 2125476 - DNA, 15 bp, Homo sapiens
tgagattaaaggtgt

SEQ ID NO: 2125477 - DNA, 15 bp, Homo sapiens
gagattaaaggtgtg

SEQ ID NO: 2125478 - DNA, 15 bp, Homo sapiens
agattaaaggtgtga

SEQ ID NO: 2125479 - DNA, 15 bp, Homo sapiens
gattaaaggtgtgag

SEQ ID NO: 2125480 - DNA, 15 bp, Homo sapiens
attaaaggtgtgagc

SEQ ID NO: 2125481 - DNA, 15 bp, Homo sapiens
ttaaaggtgtgagcc

SEQ ID NO: 2125482 - DNA, 15 bp, Homo sapiens
taaaggtgtgagcca

SEQ ID NO: 2125483 - DNA, 15 bp, Homo sapiens
aaaggtgtgagccaa

SEQ ID NO: 2125484 - DNA, 15 bp, Homo sapiens
aaggtgtgagccaac

SEQ ID NO: 2125485 - DNA, 15 bp, Homo sapiens
aggtgtgagccaacg

SEQ ID NO: 2125486 - DNA, 15 bp, Homo sapiens
ggtgtgagccaacgt

SEQ ID NO: 2125487 - DNA, 15 bp, Homo sapiens
gtgtgagccaacgta

SEQ ID NO: 2125488 - DNA, 15 bp, Homo sapiens
tgtgagccaacgtac

SEQ ID NO: 2125489 - DNA, 15 bp, Homo sapiens
gtgagccaacgtacc

SEQ ID NO: 2125490 - DNA, 15 bp, Homo sapiens
tgagccaacgtaccc

SEQ ID NO: 2125491 - DNA, 15 bp, Homo sapiens
gagccaacgtaccca

SEQ ID NO: 2125492 - DNA, 15 bp, Homo sapiens
agccaacgtacccag

SEQ ID NO: 2125493 - DNA, 15 bp, Homo sapiens
gccaacgtacccagc

SEQ ID NO: 2125494 - DNA, 15 bp, Homo sapiens
ccaacgtacccagcc

SEQ ID NO: 2125495 - DNA, 15 bp, Homo sapiens
caacgtacccagccc

SEQ ID NO: 2125496 - DNA, 15 bp, Homo sapiens
aacgtacccagccca

SEQ ID NO: 2125497 - DNA, 15 bp, Homo sapiens
acgtacccagcccat

SEQ ID NO: 2125498 - DNA, 15 bp, Homo sapiens
cgtacccagcccatt

SEQ ID NO: 2125499 - DNA, 15 bp, Homo sapiens
gtacccagcccattt

SEQ ID NO: 2125500 - DNA, 15 bp, Homo sapiens
tacccagcccattta

SEQ ID NO: 2125501 - DNA, 15 bp, Homo sapiens
acccagcccatttac

SEQ ID NO: 2125502 - DNA, 15 bp, Homo sapiens
cccagcccatttaca

SEQ ID NO: 2125503 - DNA, 15 bp, Homo sapiens
ccagcccatttacag

SEQ ID NO: 2125504 - DNA, 15 bp, Homo sapiens
cagcccatttacagt

SEQ ID NO: 2125505 - DNA, 15 bp, Homo sapiens
agcccatttacagta

SEQ ID NO: 2125506 - DNA, 15 bp, Homo sapiens
gcccatttacagtat

SEQ ID NO: 2125507 - DNA, 15 bp, Homo sapiens
cccatttacagtatt

SEQ ID NO: 2125508 - DNA, 15 bp, Homo sapiens
ccatttacagtattt

SEQ ID NO: 2125509 - DNA, 15 bp, Homo sapiens
catttacagtatttt

SEQ ID NO: 2125510 - DNA, 15 bp, Homo sapiens
atttacagtattttt

SEQ ID NO: 2125511 - DNA, 15 bp, Homo sapiens
tttacagtattttta

SEQ ID NO: 2125512 - DNA, 15 bp, Homo sapiens
ttacagtatttttaa

SEQ ID NO: 2125513 - DNA, 15 bp, Homo sapiens
tacagtatttttaat

SEQ ID NO: 2125514 - DNA, 15 bp, Homo sapiens
acagtatttttaatg

SEQ ID NO: 2125515 - DNA, 15 bp, Homo sapiens
cagtatttttaatgt

SEQ ID NO: 2125516 - DNA, 15 bp, Homo sapiens
agtatttttaatgtt

SEQ ID NO: 2125517 - DNA, 15 bp, Homo sapiens
gtatttttaatgttg

SEQ ID NO: 2125518 - DNA, 15 bp, Homo sapiens
tatttttaatgttga

SEQ ID NO: 2125519 - DNA, 15 bp, Homo sapiens
atttttaatgttgac

SEQ ID NO: 2125520 - DNA, 15 bp, Homo sapiens
tttttaatgttgacg

SEQ ID NO: 2125521 - DNA, 15 bp, Homo sapiens
ttttaatgttgacgt

SEQ ID NO: 2125522 - DNA, 15 bp, Homo sapiens
tttaatgttgacgtg

SEQ ID NO: 2125523 - DNA, 15 bp, Homo sapiens
ttaatgttgacgtga

SEQ ID NO: 2125524 - DNA, 15 bp, Homo sapiens
taatgttgacgtgaa

SEQ ID NO: 2125525 - DNA, 15 bp, Homo sapiens
aatgttgacgtgaac

SEQ ID NO: 2125526 - DNA, 15 bp, Homo sapiens
atgttgacgtgaact

SEQ ID NO: 2125527 - DNA, 15 bp, Homo sapiens
tgttgacgtgaacta

SEQ ID NO: 2125528 - DNA, 15 bp, Homo sapiens
gttgacgtgaactat

SEQ ID NO: 2125529 - DNA, 15 bp, Homo sapiens
ttgacgtgaactatg

SEQ ID NO: 2125530 - DNA, 15 bp, Homo sapiens
tgacgtgaactatgt

SEQ ID NO: 2125531 - DNA, 15 bp, Homo sapiens
gacgtgaactatgta

SEQ ID NO: 2125532 - DNA, 15 bp, Homo sapiens
acgtgaactatgtat

SEQ ID NO: 2125533 - DNA, 15 bp, Homo sapiens
cgtgaactatgtata

SEQ ID NO: 2125534 - DNA, 15 bp, Homo sapiens
gtgaactatgtatac

SEQ ID NO: 2125535 - DNA, 15 bp, Homo sapiens
tgaactatgtataca

SEQ ID NO: 2125536 - DNA, 15 bp, Homo sapiens
gaactatgtatacaa

SEQ ID NO: 2125537 - DNA, 15 bp, Homo sapiens
aactatgtatacaat

SEQ ID NO: 2125538 - DNA, 15 bp, Homo sapiens
actatgtatacaatt

SEQ ID NO: 2125539 - DNA, 15 bp, Homo sapiens
ctatgtatacaattg

SEQ ID NO: 2125540 - DNA, 15 bp, Homo sapiens
tatgtatacaattgt

SEQ ID NO: 2125541 - DNA, 15 bp, Homo sapiens
atgtatacaattgtt

SEQ ID NO: 2125542 - DNA, 15 bp, Homo sapiens
tgtatacaattgtta

SEQ ID NO: 2125543 - DNA, 15 bp, Homo sapiens
gtatacaattgttaa

SEQ ID NO: 2125544 - DNA, 15 bp, Homo sapiens
tatacaattgttaag

SEQ ID NO: 2125545 - DNA, 15 bp, Homo sapiens
atacaattgttaagc

SEQ ID NO: 2125546 - DNA, 15 bp, Homo sapiens
tacaattgttaagca

SEQ ID NO: 2125547 - DNA, 15 bp, Homo sapiens
acaattgttaagcat

SEQ ID NO: 2125548 - DNA, 15 bp, Homo sapiens
caattgttaagcata

SEQ ID NO: 2125549 - DNA, 15 bp, Homo sapiens
aattgttaagcatat

SEQ ID NO: 2125550 - DNA, 15 bp, Homo sapiens
attgttaagcatata

SEQ ID NO: 2125551 - DNA, 15 bp, Homo sapiens
ttgttaagcatatac

SEQ ID NO: 2125552 - DNA, 15 bp, Homo sapiens
tgttaagcatatact

SEQ ID NO: 2125553 - DNA, 15 bp, Homo sapiens
gttaagcatatactc

SEQ ID NO: 2125554 - DNA, 15 bp, Homo sapiens
ttaagcatatactca

SEQ ID NO: 2125555 - DNA, 15 bp, Homo sapiens
taagcatatactcac

SEQ ID NO: 2125556 - DNA, 15 bp, Homo sapiens
aagcatatactcact

SEQ ID NO: 2125557 - DNA, 15 bp, Homo sapiens
agcatatactcactg

SEQ ID NO: 2125558 - DNA, 15 bp, Homo sapiens
gcatatactcactga

SEQ ID NO: 2125559 - DNA, 15 bp, Homo sapiens
catatactcactgag

SEQ ID NO: 2125560 - DNA, 15 bp, Homo sapiens
atatactcactgagc

SEQ ID NO: 2125561 - DNA, 15 bp, Homo sapiens
tatactcactgagct

SEQ ID NO: 2125562 - DNA, 15 bp, Homo sapiens
atactcactgagctt

SEQ ID NO: 2125563 - DNA, 15 bp, Homo sapiens
tactcactgagcttt

SEQ ID NO: 2125564 - DNA, 15 bp, Homo sapiens
actcactgagcttta

SEQ ID NO: 2125565 - DNA, 15 bp, Homo sapiens
ctcactgagctttaa

SEQ ID NO: 2125566 - DNA, 15 bp, Homo sapiens
tcactgagctttaat

SEQ ID NO: 2125567 - DNA, 15 bp, Homo sapiens
cactgagctttaata

SEQ ID NO: 2125568 - DNA, 15 bp, Homo sapiens
actgagctttaatat

SEQ ID NO: 2125569 - DNA, 15 bp, Homo sapiens
ctgagctttaatatg

SEQ ID NO: 2125570 - DNA, 15 bp, Homo sapiens
tgagctttaatatgt

SEQ ID NO: 2125571 - DNA, 15 bp, Homo sapiens
gagctttaatatgta

SEQ ID NO: 2125572 - DNA, 15 bp, Homo sapiens
agctttaatatgtat

SEQ ID NO: 2125573 - DNA, 15 bp, Homo sapiens
gctttaatatgtata

SEQ ID NO: 2125574 - DNA, 15 bp, Homo sapiens
ctttaatatgtataa

SEQ ID NO: 2125575 - DNA, 15 bp, Homo sapiens
tttaatatgtataac

SEQ ID NO: 2125576 - DNA, 15 bp, Homo sapiens
ttaatatgtataacc

SEQ ID NO: 2125577 - DNA, 15 bp, Homo sapiens
taatatgtataaccc

SEQ ID NO: 2125578 - DNA, 15 bp, Homo sapiens
aatatgtataacccc

SEQ ID NO: 2125579 - DNA, 15 bp, Homo sapiens
atatgtataaccccg

SEQ ID NO: 2125580 - DNA, 15 bp, Homo sapiens
tatgtataaccccgt

SEQ ID NO: 2125581 - DNA, 15 bp, Homo sapiens
atgtataaccccgtg

SEQ ID NO: 2125582 - DNA, 15 bp, Homo sapiens
tgtataaccccgtgt

SEQ ID NO: 2125583 - DNA, 15 bp, Homo sapiens
gtataaccccgtgtt

SEQ ID NO: 2125584 - DNA, 15 bp, Homo sapiens
tataaccccgtgttc

SEQ ID NO: 2125585 - DNA, 15 bp, Homo sapiens
ataaccccgtgttct

SEQ ID NO: 2125586 - DNA, 15 bp, Homo sapiens
taaccccgtgttctc

SEQ ID NO: 2125587 - DNA, 15 bp, Homo sapiens
aaccccgtgttctct

SEQ ID NO: 2125588 - DNA, 15 bp, Homo sapiens
accccgtgttctctt

SEQ ID NO: 2125589 - DNA, 15 bp, Homo sapiens
ccccgtgttctcttt

SEQ ID NO: 2125590 - DNA, 15 bp, Homo sapiens
cccgtgttctctttt

SEQ ID NO: 2125591 - DNA, 15 bp, Homo sapiens
ccgtgttctcttttg

SEQ ID NO: 2125592 - DNA, 15 bp, Homo sapiens
cgtgttctcttttga

SEQ ID NO: 2125593 - DNA, 15 bp, Homo sapiens
gtgttctcttttgat

SEQ ID NO: 2125594 - DNA, 15 bp, Homo sapiens
tgttctcttttgata

SEQ ID NO: 2125595 - DNA, 15 bp, Homo sapiens
gttctcttttgataa

SEQ ID NO: 2125596 - DNA, 15 bp, Homo sapiens
ttctcttttgataaa

SEQ ID NO: 2125597 - DNA, 15 bp, Homo sapiens
tctcttttgataaac

SEQ ID NO: 2125598 - DNA, 15 bp, Homo sapiens
ctcttttgataaact

SEQ ID NO: 2125599 - DNA, 15 bp, Homo sapiens
tcttttgataaacta

SEQ ID NO: 2125600 - DNA, 15 bp, Homo sapiens
cttttgataaactag

SEQ ID NO: 2125601 - DNA, 15 bp, Homo sapiens
ttttgataaactaga

SEQ ID NO: 2125602 - DNA, 15 bp, Homo sapiens
tttgataaactagaa

SEQ ID NO: 2125603 - DNA, 15 bp, Homo sapiens
ttgataaactagaaa

SEQ ID NO: 2125604 - DNA, 15 bp, Homo sapiens
tgataaactagaaaa

SEQ ID NO: 2125605 - DNA, 15 bp, Homo sapiens
gataaactagaaaac

SEQ ID NO: 2125606 - DNA, 15 bp, Homo sapiens
ataaactagaaaacc

SEQ ID NO: 2125607 - DNA, 15 bp, Homo sapiens
taaactagaaaacct

SEQ ID NO: 2125608 - DNA, 15 bp, Homo sapiens
aaactagaaaacctt

SEQ ID NO: 2125609 - DNA, 15 bp, Homo sapiens
aactagaaaaccttt

SEQ ID NO: 2125610 - DNA, 15 bp, Homo sapiens
actagaaaacctttc

SEQ ID NO: 2125611 - DNA, 15 bp, Homo sapiens
ctagaaaacctttcc

SEQ ID NO: 2125612 - DNA, 15 bp, Homo sapiens
tagaaaacctttccc

SEQ ID NO: 2125613 - DNA, 15 bp, Homo sapiens
agaaaacctttccca

SEQ ID NO: 2125614 - DNA, 15 bp, Homo sapiens
gaaaacctttcccaa

SEQ ID NO: 2125615 - DNA, 15 bp, Homo sapiens
aaaacctttcccaac

SEQ ID NO: 2125616 - DNA, 15 bp, Homo sapiens
aaacctttcccaaca

SEQ ID NO: 2125617 - DNA, 15 bp, Homo sapiens
aacctttcccaacat

SEQ ID NO: 2125618 - DNA, 15 bp, Homo sapiens
acctttcccaacatc

SEQ ID NO: 2125619 - DNA, 15 bp, Homo sapiens
cctttcccaacatcc

SEQ ID NO: 2125620 - DNA, 15 bp, Homo sapiens
ctttcccaacatcct

SEQ ID NO: 2125621 - DNA, 15 bp, Homo sapiens
tttcccaacatccta

SEQ ID NO: 2125622 - DNA, 15 bp, Homo sapiens
ttcccaacatcctaa

SEQ ID NO: 2125623 - DNA, 15 bp, Homo sapiens
tcccaacatcctaat

SEQ ID NO: 2125624 - DNA, 15 bp, Homo sapiens
cccaacatcctaata

SEQ ID NO: 2125625 - DNA, 15 bp, Homo sapiens
ccaacatcctaatac

SEQ ID NO: 2125626 - DNA, 15 bp, Homo sapiens
caacatcctaataca

SEQ ID NO: 2125627 - DNA, 15 bp, Homo sapiens
aacatcctaatacac

SEQ ID NO: 2125628 - DNA, 15 bp, Homo sapiens
acatcctaatacact

SEQ ID NO: 2125629 - DNA, 15 bp, Homo sapiens
catcctaatacactt

SEQ ID NO: 2125630 - DNA, 15 bp, Homo sapiens
atcctaatacacttt

SEQ ID NO: 2125631 - DNA, 15 bp, Homo sapiens
tcctaatacactttt

SEQ ID NO: 2125632 - DNA, 15 bp, Homo sapiens
cctaatacacttttg

SEQ ID NO: 2125633 - DNA, 15 bp, Homo sapiens
ctaatacacttttga

SEQ ID NO: 2125634 - DNA, 15 bp, Homo sapiens
taatacacttttgaa

SEQ ID NO: 2125635 - DNA, 15 bp, Homo sapiens
aatacacttttgaag

SEQ ID NO: 2125636 - DNA, 15 bp, Homo sapiens
atacacttttgaagg

SEQ ID NO: 2125637 - DNA, 15 bp, Homo sapiens
tacacttttgaagga

SEQ ID NO: 2125638 - DNA, 15 bp, Homo sapiens
acacttttgaaggat

SEQ ID NO: 2125639 - DNA, 15 bp, Homo sapiens
cacttttgaaggata

SEQ ID NO: 2125640 - DNA, 15 bp, Homo sapiens
acttttgaaggatat

SEQ ID NO: 2125641 - DNA, 15 bp, Homo sapiens
cttttgaaggatatc

SEQ ID NO: 2125642 - DNA, 15 bp, Homo sapiens
ttttgaaggatatca

SEQ ID NO: 2125643 - DNA, 15 bp, Homo sapiens
tttgaaggatatcat

SEQ ID NO: 2125644 - DNA, 15 bp, Homo sapiens
ttgaaggatatcata

SEQ ID NO: 2125645 - DNA, 15 bp, Homo sapiens
tgaaggatatcataa

SEQ ID NO: 2125646 - DNA, 15 bp, Homo sapiens
gaaggatatcataaa

SEQ ID NO: 2125647 - DNA, 15 bp, Homo sapiens
aaggatatcataaat

SEQ ID NO: 2125648 - DNA, 15 bp, Homo sapiens
aggatatcataaata

SEQ ID NO: 2125649 - DNA, 15 bp, Homo sapiens
ggatatcataaatag

SEQ ID NO: 2125650 - DNA, 15 bp, Homo sapiens
gatatcataaatagt

SEQ ID NO: 2125651 - DNA, 15 bp, Homo sapiens
atatcataaatagtg

SEQ ID NO: 2125652 - DNA, 15 bp, Homo sapiens
tatcataaatagtgt

SEQ ID NO: 2125653 - DNA, 15 bp, Homo sapiens
atcataaatagtgtg

SEQ ID NO: 2125654 - DNA, 15 bp, Homo sapiens
tcataaatagtgtgt

SEQ ID NO: 2125655 - DNA, 15 bp, Homo sapiens
cataaatagtgtgtt

SEQ ID NO: 2125656 - DNA, 15 bp, Homo sapiens
ataaatagtgtgttt

SEQ ID NO: 2125657 - DNA, 15 bp, Homo sapiens
taaatagtgtgtttg

SEQ ID NO: 2125658 - DNA, 15 bp, Homo sapiens
aaatagtgtgtttga

SEQ ID NO: 2125659 - DNA, 15 bp, Homo sapiens
aatagtgtgtttgag

SEQ ID NO: 2125660 - DNA, 15 bp, Homo sapiens
atagtgtgtttgagg

SEQ ID NO: 2125661 - DNA, 15 bp, Homo sapiens
tagtgtgtttgaggg

SEQ ID NO: 2125662 - DNA, 15 bp, Homo sapiens
agtgtgtttgagggc

SEQ ID NO: 2125663 - DNA, 15 bp, Homo sapiens
gtgtgtttgagggct

SEQ ID NO: 2125664 - DNA, 15 bp, Homo sapiens
tgtgtttgagggcta

SEQ ID NO: 2125665 - DNA, 15 bp, Homo sapiens
gtgtttgagggctag

SEQ ID NO: 2125666 - DNA, 15 bp, Homo sapiens
tgtttgagggctaga

SEQ ID NO: 2125667 - DNA, 15 bp, Homo sapiens
gtttgagggctagag

SEQ ID NO: 2125668 - DNA, 15 bp, Homo sapiens
tttgagggctagagg

SEQ ID NO: 2125669 - DNA, 15 bp, Homo sapiens
ttgagggctagagga

SEQ ID NO: 2125670 - DNA, 15 bp, Homo sapiens
tgagggctagaggaa

SEQ ID NO: 2125671 - DNA, 15 bp, Homo sapiens
gagggctagaggaat

SEQ ID NO: 2125672 - DNA, 15 bp, Homo sapiens
agggctagaggaatg

SEQ ID NO: 2125673 - DNA, 15 bp, Homo sapiens
gggctagaggaatgg

SEQ ID NO: 2125674 - DNA, 15 bp, Homo sapiens
ggctagaggaatggc

SEQ ID NO: 2125675 - DNA, 15 bp, Homo sapiens
gctagaggaatggcc

SEQ ID NO: 2125676 - DNA, 15 bp, Homo sapiens
ctagaggaatggccc

SEQ ID NO: 2125677 - DNA, 15 bp, Homo sapiens
tagaggaatggccca

SEQ ID NO: 2125678 - DNA, 15 bp, Homo sapiens
agaggaatggcccaa

SEQ ID NO: 2125679 - DNA, 15 bp, Homo sapiens
gaggaatggcccaag

SEQ ID NO: 2125680 - DNA, 15 bp, Homo sapiens
aggaatggcccaagt

SEQ ID NO: 2125681 - DNA, 15 bp, Homo sapiens
ggaatggcccaagta

SEQ ID NO: 2125682 - DNA, 15 bp, Homo sapiens
gaatggcccaagtac

SEQ ID NO: 2125683 - DNA, 15 bp, Homo sapiens
aatggcccaagtact

SEQ ID NO: 2125684 - DNA, 15 bp, Homo sapiens
atggcccaagtactg

SEQ ID NO: 2125685 - DNA, 15 bp, Homo sapiens
tggcccaagtactgt

SEQ ID NO: 2125686 - DNA, 15 bp, Homo sapiens
ggcccaagtactgtg

SEQ ID NO: 2125687 - DNA, 15 bp, Homo sapiens
gcccaagtactgtga

SEQ ID NO: 2125688 - DNA, 15 bp, Homo sapiens
cccaagtactgtgat

SEQ ID NO: 2125689 - DNA, 15 bp, Homo sapiens
ccaagtactgtgatg

SEQ ID NO: 2125690 - DNA, 15 bp, Homo sapiens
caagtactgtgatga

SEQ ID NO: 2125691 - DNA, 15 bp, Homo sapiens
aagtactgtgatgag

SEQ ID NO: 2125692 - DNA, 15 bp, Homo sapiens
agtactgtgatgagg

SEQ ID NO: 2125693 - DNA, 15 bp, Homo sapiens
gtactgtgatgaggt

SEQ ID NO: 2125694 - DNA, 15 bp, Homo sapiens
tactgtgatgaggtt

SEQ ID NO: 2125695 - DNA, 15 bp, Homo sapiens
actgtgatgaggttc

SEQ ID NO: 2125696 - DNA, 15 bp, Homo sapiens
ctgtgatgaggttca

SEQ ID NO: 2125697 - DNA, 15 bp, Homo sapiens
tgtgatgaggttcat

SEQ ID NO: 2125698 - DNA, 15 bp, Homo sapiens
gtgatgaggttcata

SEQ ID NO: 2125699 - DNA, 15 bp, Homo sapiens
tgatgaggttcatag

SEQ ID NO: 2125700 - DNA, 15 bp, Homo sapiens
gatgaggttcatagg

SEQ ID NO: 2125701 - DNA, 15 bp, Homo sapiens
atgaggttcatagga

SEQ ID NO: 2125702 - DNA, 15 bp, Homo sapiens
tgaggttcataggat

SEQ ID NO: 2125703 - DNA, 15 bp, Homo sapiens
gaggttcataggatt

SEQ ID NO: 2125704 - DNA, 15 bp, Homo sapiens
aggttcataggattt

SEQ ID NO: 2125705 - DNA, 15 bp, Homo sapiens
ggttcataggatttg

SEQ ID NO: 2125706 - DNA, 15 bp, Homo sapiens
gttcataggatttgg

SEQ ID NO: 2125707 - DNA, 15 bp, Homo sapiens
ttcataggatttggg

SEQ ID NO: 2125708 - DNA, 15 bp, Homo sapiens
tcataggatttgggg

SEQ ID NO: 2125709 - DNA, 15 bp, Homo sapiens
cataggatttggggc

SEQ ID NO: 2125710 - DNA, 15 bp, Homo sapiens
ataggatttggggct

SEQ ID NO: 2125711 - DNA, 15 bp, Homo sapiens
taggatttggggcta

SEQ ID NO: 2125712 - DNA, 15 bp, Homo sapiens
aggatttggggctat

SEQ ID NO: 2125713 - DNA, 15 bp, Homo sapiens
ggatttggggctatt

SEQ ID NO: 2125714 - DNA, 15 bp, Homo sapiens
gatttggggctattt

SEQ ID NO: 2125715 - DNA, 15 bp, Homo sapiens
atttggggctatttg

SEQ ID NO: 2125716 - DNA, 15 bp, Homo sapiens
tttggggctatttgg

SEQ ID NO: 2125717 - DNA, 15 bp, Homo sapiens
ttggggctatttgga

SEQ ID NO: 2125718 - DNA, 15 bp, Homo sapiens
tggggctatttggaa

SEQ ID NO: 2125719 - DNA, 15 bp, Homo sapiens
ggggctatttggaag

SEQ ID NO: 2125720 - DNA, 15 bp, Homo sapiens
gggctatttggaaga

SEQ ID NO: 2125721 - DNA, 15 bp, Homo sapiens
ggctatttggaagac

SEQ ID NO: 2125722 - DNA, 15 bp, Homo sapiens
gctatttggaagacc

SEQ ID NO: 2125723 - DNA, 15 bp, Homo sapiens
ctatttggaagaccc

SEQ ID NO: 2125724 - DNA, 15 bp, Homo sapiens
tatttggaagaccct

SEQ ID NO: 2125725 - DNA, 15 bp, Homo sapiens
atttggaagaccctt

SEQ ID NO: 2125726 - DNA, 15 bp, Homo sapiens
tttggaagaccctta

SEQ ID NO: 2125727 - DNA, 15 bp, Homo sapiens
ttggaagacccttac

SEQ ID NO: 2125728 - DNA, 15 bp, Homo sapiens
tggaagacccttaca

SEQ ID NO: 2125729 - DNA, 15 bp, Homo sapiens
ggaagacccttacaa

SEQ ID NO: 2125730 - DNA, 15 bp, Homo sapiens
gaagacccttacaag

SEQ ID NO: 2125731 - DNA, 15 bp, Homo sapiens
aagacccttacaagg

SEQ ID NO: 2125732 - DNA, 15 bp, Homo sapiens
agacccttacaaggc

SEQ ID NO: 2125733 - DNA, 15 bp, Homo sapiens
gacccttacaaggca

SEQ ID NO: 2125734 - DNA, 15 bp, Homo sapiens
acccttacaaggcat

SEQ ID NO: 2125735 - DNA, 15 bp, Homo sapiens
cccttacaaggcata

SEQ ID NO: 2125736 - DNA, 15 bp, Homo sapiens
ccttacaaggcatat

SEQ ID NO: 2125737 - DNA, 15 bp, Homo sapiens
cttacaaggcatata

SEQ ID NO: 2125738 - DNA, 15 bp, Homo sapiens
ttacaaggcatatag

SEQ ID NO: 2125739 - DNA, 15 bp, Homo sapiens
tacaaggcatatagc

SEQ ID NO: 2125740 - DNA, 15 bp, Homo sapiens
acaaggcatatagca

SEQ ID NO: 2125741 - DNA, 15 bp, Homo sapiens
caaggcatatagcac

SEQ ID NO: 2125742 - DNA, 15 bp, Homo sapiens
aaggcatatagcaca

SEQ ID NO: 2125743 - DNA, 15 bp, Homo sapiens
aggcatatagcacaa

SEQ ID NO: 2125744 - DNA, 15 bp, Homo sapiens
ggcatatagcacaac

SEQ ID NO: 2125745 - DNA, 15 bp, Homo sapiens
gcatatagcacaact

SEQ ID NO: 2125746 - DNA, 15 bp, Homo sapiens
catatagcacaactt

SEQ ID NO: 2125747 - DNA, 15 bp, Homo sapiens
atatagcacaacttt

SEQ ID NO: 2125748 - DNA, 15 bp, Homo sapiens
tatagcacaactttt

SEQ ID NO: 2125749 - DNA, 15 bp, Homo sapiens
atagcacaacttttc

SEQ ID NO: 2125750 - DNA, 15 bp, Homo sapiens
tagcacaacttttct

SEQ ID NO: 2125751 - DNA, 15 bp, Homo sapiens
agcacaacttttcta

SEQ ID NO: 2125752 - DNA, 15 bp, Homo sapiens
gcacaacttttctat

SEQ ID NO: 2125753 - DNA, 15 bp, Homo sapiens
cacaacttttctatc

SEQ ID NO: 2125754 - DNA, 15 bp, Homo sapiens
acaacttttctatct

SEQ ID NO: 2125755 - DNA, 15 bp, Homo sapiens
caacttttctatctg

SEQ ID NO: 2125756 - DNA, 15 bp, Homo sapiens
aacttttctatctgt

SEQ ID NO: 2125757 - DNA, 15 bp, Homo sapiens
acttttctatctgtt

SEQ ID NO: 2125758 - DNA, 15 bp, Homo sapiens
cttttctatctgttg

SEQ ID NO: 2125759 - DNA, 15 bp, Homo sapiens
ttttctatctgttga

SEQ ID NO: 2125760 - DNA, 15 bp, Homo sapiens
tttctatctgttgat

SEQ ID NO: 2125761 - DNA, 15 bp, Homo sapiens
ttctatctgttgatt

SEQ ID NO: 2125762 - DNA, 15 bp, Homo sapiens
tctatctgttgattg

SEQ ID NO: 2125763 - DNA, 15 bp, Homo sapiens
ctatctgttgattgt

SEQ ID NO: 2125764 - DNA, 15 bp, Homo sapiens
tatctgttgattgtc

SEQ ID NO: 2125765 - DNA, 15 bp, Homo sapiens
atctgttgattgtct

SEQ ID NO: 2125766 - DNA, 15 bp, Homo sapiens
tctgttgattgtctc

SEQ ID NO: 2125767 - DNA, 15 bp, Homo sapiens
ctgttgattgtctct

SEQ ID NO: 2125768 - DNA, 15 bp, Homo sapiens
tgttgattgtctctg

SEQ ID NO: 2125769 - DNA, 15 bp, Homo sapiens
gttgattgtctctgt

SEQ ID NO: 2125770 - DNA, 15 bp, Homo sapiens
ttgattgtctctgta

SEQ ID NO: 2125771 - DNA, 15 bp, Homo sapiens
tgattgtctctgtag

SEQ ID NO: 2125772 - DNA, 15 bp, Homo sapiens
gattgtctctgtagc

SEQ ID NO: 2125773 - DNA, 15 bp, Homo sapiens
attgtctctgtagca

SEQ ID NO: 2125774 - DNA, 15 bp, Homo sapiens
ttgtctctgtagcat

SEQ ID NO: 2125775 - DNA, 15 bp, Homo sapiens
tgtctctgtagcatc

SEQ ID NO: 2125776 - DNA, 15 bp, Homo sapiens
gtctctgtagcatcc

SEQ ID NO: 2125777 - DNA, 15 bp, Homo sapiens
tctctgtagcatcct

SEQ ID NO: 2125778 - DNA, 15 bp, Homo sapiens
ctctgtagcatcctc

SEQ ID NO: 2125779 - DNA, 15 bp, Homo sapiens
tctgtagcatcctca

SEQ ID NO: 2125780 - DNA, 15 bp, Homo sapiens
ctgtagcatcctcac

SEQ ID NO: 2125781 - DNA, 15 bp, Homo sapiens
tgtagcatcctcaca

SEQ ID NO: 2125782 - DNA, 15 bp, Homo sapiens
gtagcatcctcacaa

SEQ ID NO: 2125783 - DNA, 15 bp, Homo sapiens
tagcatcctcacaaa

SEQ ID NO: 2125784 - DNA, 15 bp, Homo sapiens
agcatcctcacaaaa

SEQ ID NO: 2125785 - DNA, 15 bp, Homo sapiens
gcatcctcacaaaat

SEQ ID NO: 2125786 - DNA, 15 bp, Homo sapiens
catcctcacaaaatc

SEQ ID NO: 2125787 - DNA, 15 bp, Homo sapiens
atcctcacaaaatcc

SEQ ID NO: 2125788 - DNA, 15 bp, Homo sapiens
tcctcacaaaatcca

SEQ ID NO: 2125789 - DNA, 15 bp, Homo sapiens
cctcacaaaatccac

SEQ ID NO: 2125790 - DNA, 15 bp, Homo sapiens
ctcacaaaatccact

SEQ ID NO: 2125791 - DNA, 15 bp, Homo sapiens
tcacaaaatccacta

SEQ ID NO: 2125792 - DNA, 15 bp, Homo sapiens
cacaaaatccactat

SEQ ID NO: 2125793 - DNA, 15 bp, Homo sapiens
acaaaatccactatt

SEQ ID NO: 2125794 - DNA, 15 bp, Homo sapiens
caaaatccactattg

SEQ ID NO: 2125795 - DNA, 15 bp, Homo sapiens
aaaatccactattgg

SEQ ID NO: 2125796 - DNA, 15 bp, Homo sapiens
aaatccactattggc

SEQ ID NO: 2125797 - DNA, 15 bp, Homo sapiens
aatccactattggct

SEQ ID NO: 2125798 - DNA, 15 bp, Homo sapiens
atccactattggctt

SEQ ID NO: 2125799 - DNA, 15 bp, Homo sapiens
tccactattggcttg

SEQ ID NO: 2125800 - DNA, 15 bp, Homo sapiens
ccactattggcttgc

SEQ ID NO: 2125801 - DNA, 15 bp, Homo sapiens
cactattggcttgca

SEQ ID NO: 2125802 - DNA, 15 bp, Homo sapiens
actattggcttgcag

SEQ ID NO: 2125803 - DNA, 15 bp, Homo sapiens
ctattggcttgcagg

SEQ ID NO: 2125804 - DNA, 15 bp, Homo sapiens
tattggcttgcaggt

SEQ ID NO: 2125805 - DNA, 15 bp, Homo sapiens
attggcttgcaggtc

SEQ ID NO: 2125806 - DNA, 15 bp, Homo sapiens
ttggcttgcaggtct

SEQ ID NO: 2125807 - DNA, 15 bp, Homo sapiens
tggcttgcaggtctt

SEQ ID NO: 2125808 - DNA, 15 bp, Homo sapiens
ggcttgcaggtcttc

SEQ ID NO: 2125809 - DNA, 15 bp, Homo sapiens
gcttgcaggtcttca

SEQ ID NO: 2125810 - DNA, 15 bp, Homo sapiens
cttgcaggtcttcag

SEQ ID NO: 2125811 - DNA, 15 bp, Homo sapiens
ttgcaggtcttcaga

SEQ ID NO: 2125812 - DNA, 15 bp, Homo sapiens
tgcaggtcttcagag

SEQ ID NO: 2125813 - DNA, 15 bp, Homo sapiens
gcaggtcttcagaga

SEQ ID NO: 2125814 - DNA, 15 bp, Homo sapiens
caggtcttcagagac

SEQ ID NO: 2125815 - DNA, 15 bp, Homo sapiens
aggtcttcagagact

SEQ ID NO: 2125816 - DNA, 15 bp, Homo sapiens
ggtcttcagagactg

SEQ ID NO: 2125817 - DNA, 15 bp, Homo sapiens
gtcttcagagactgg

SEQ ID NO: 2125818 - DNA, 15 bp, Homo sapiens
tcttcagagactggc

SEQ ID NO: 2125819 - DNA, 15 bp, Homo sapiens
cttcagagactggca

SEQ ID NO: 2125820 - DNA, 15 bp, Homo sapiens
ttcagagactggcat

SEQ ID NO: 2125821 - DNA, 15 bp, Homo sapiens
tcagagactggcatt

SEQ ID NO: 2125822 - DNA, 15 bp, Homo sapiens
cagagactggcattc

SEQ ID NO: 2125823 - DNA, 15 bp, Homo sapiens
agagactggcattca

SEQ ID NO: 2125824 - DNA, 15 bp, Homo sapiens
gagactggcattcac

SEQ ID NO: 2125825 - DNA, 15 bp, Homo sapiens
agactggcattcacc

SEQ ID NO: 2125826 - DNA, 15 bp, Homo sapiens
gactggcattcacca

SEQ ID NO: 2125827 - DNA, 15 bp, Homo sapiens
actggcattcaccag

SEQ ID NO: 2125828 - DNA, 15 bp, Homo sapiens
ctggcattcaccagt

SEQ ID NO: 2125829 - DNA, 15 bp, Homo sapiens
tggcattcaccagtt

SEQ ID NO: 2125830 - DNA, 15 bp, Homo sapiens
ggcattcaccagttc

SEQ ID NO: 2125831 - DNA, 15 bp, Homo sapiens
gcattcaccagttct

SEQ ID NO: 2125832 - DNA, 15 bp, Homo sapiens
cattcaccagttctg

SEQ ID NO: 2125833 - DNA, 15 bp, Homo sapiens
attcaccagttctgg

SEQ ID NO: 2125834 - DNA, 15 bp, Homo sapiens
ttcaccagttctgga

SEQ ID NO: 2125835 - DNA, 15 bp, Homo sapiens
tcaccagttctggag

SEQ ID NO: 2125836 - DNA, 15 bp, Homo sapiens
caccagttctggagg

SEQ ID NO: 2125837 - DNA, 15 bp, Homo sapiens
accagttctggaggt

SEQ ID NO: 2125838 - DNA, 15 bp, Homo sapiens
ccagttctggaggtg

SEQ ID NO: 2125839 - DNA, 15 bp, Homo sapiens
cagttctggaggtgt

SEQ ID NO: 2125840 - DNA, 15 bp, Homo sapiens
agttctggaggtgtt

SEQ ID NO: 2125841 - DNA, 15 bp, Homo sapiens
gttctggaggtgtta

SEQ ID NO: 2125842 - DNA, 15 bp, Homo sapiens
ttctggaggtgttaa

SEQ ID NO: 2125843 - DNA, 15 bp, Homo sapiens
tctggaggtgttaac

SEQ ID NO: 2125844 - DNA, 15 bp, Homo sapiens
ctggaggtgttaact

SEQ ID NO: 2125845 - DNA, 15 bp, Homo sapiens
tggaggtgttaactg

SEQ ID NO: 2125846 - DNA, 15 bp, Homo sapiens
ggaggtgttaactgt

SEQ ID NO: 2125847 - DNA, 15 bp, Homo sapiens
gaggtgttaactgtt

SEQ ID NO: 2125848 - DNA, 15 bp, Homo sapiens
aggtgttaactgttc

SEQ ID NO: 2125849 - DNA, 15 bp, Homo sapiens
ggtgttaactgttcc

SEQ ID NO: 2125850 - DNA, 15 bp, Homo sapiens
gtgttaactgttcca

SEQ ID NO: 2125851 - DNA, 15 bp, Homo sapiens
tgttaactgttccat

SEQ ID NO: 2125852 - DNA, 15 bp, Homo sapiens
gttaactgttccatc

SEQ ID NO: 2125853 - DNA, 15 bp, Homo sapiens
ttaactgttccatct

SEQ ID NO: 2125854 - DNA, 15 bp, Homo sapiens
taactgttccatctt

SEQ ID NO: 2125855 - DNA, 15 bp, Homo sapiens
aactgttccatcttt

SEQ ID NO: 2125856 - DNA, 15 bp, Homo sapiens
actgttccatctttg

SEQ ID NO: 2125857 - DNA, 15 bp, Homo sapiens
ctgttccatctttgg

SEQ ID NO: 2125858 - DNA, 15 bp, Homo sapiens
tgttccatctttgga

SEQ ID NO: 2125859 - DNA, 15 bp, Homo sapiens
gttccatctttggac

SEQ ID NO: 2125860 - DNA, 15 bp, Homo sapiens
ttccatctttggaca

SEQ ID NO: 2125861 - DNA, 15 bp, Homo sapiens
tccatctttggacag

SEQ ID NO: 2125862 - DNA, 15 bp, Homo sapiens
ccatctttggacagc

SEQ ID NO: 2125863 - DNA, 15 bp, Homo sapiens
catctttggacagct

SEQ ID NO: 2125864 - DNA, 15 bp, Homo sapiens
atctttggacagctc

SEQ ID NO: 2125865 - DNA, 15 bp, Homo sapiens
tctttggacagctca

SEQ ID NO: 2125866 - DNA, 15 bp, Homo sapiens
ctttggacagctcag

SEQ ID NO: 2125867 - DNA, 15 bp, Homo sapiens
tttggacagctcaga

SEQ ID NO: 2125868 - DNA, 15 bp, Homo sapiens
ttggacagctcagag

SEQ ID NO: 2125869 - DNA, 15 bp, Homo sapiens
tggacagctcagagt

SEQ ID NO: 2125870 - DNA, 15 bp, Homo sapiens
ggacagctcagagta

SEQ ID NO: 2125871 - DNA, 15 bp, Homo sapiens
gacagctcagagtat

SEQ ID NO: 2125872 - DNA, 15 bp, Homo sapiens
acagctcagagtatt

SEQ ID NO: 2125873 - DNA, 15 bp, Homo sapiens
cagctcagagtattc

SEQ ID NO: 2125874 - DNA, 15 bp, Homo sapiens
agctcagagtattca

SEQ ID NO: 2125875 - DNA, 15 bp, Homo sapiens
gctcagagtattcag

SEQ ID NO: 2125876 - DNA, 15 bp, Homo sapiens
ctcagagtattcaga

SEQ ID NO: 2125877 - DNA, 15 bp, Homo sapiens
tcagagtattcagac

SEQ ID NO: 2125878 - DNA, 15 bp, Homo sapiens
cagagtattcagacg

SEQ ID NO: 2125879 - DNA, 15 bp, Homo sapiens
agagtattcagacgt

SEQ ID NO: 2125880 - DNA, 15 bp, Homo sapiens
gagtattcagacgtc

SEQ ID NO: 2125881 - DNA, 15 bp, Homo sapiens
agtattcagacgtct

SEQ ID NO: 2125882 - DNA, 15 bp, Homo sapiens
gtattcagacgtctt

SEQ ID NO: 2125883 - DNA, 15 bp, Homo sapiens
tattcagacgtcttt

SEQ ID NO: 2125884 - DNA, 15 bp, Homo sapiens
attcagacgtcttta

SEQ ID NO: 2125885 - DNA, 15 bp, Homo sapiens
ttcagacgtctttat

SEQ ID NO: 2125886 - DNA, 15 bp, Homo sapiens
tcagacgtctttatt

SEQ ID NO: 2125887 - DNA, 15 bp, Homo sapiens
cagacgtctttattt

SEQ ID NO: 2125888 - DNA, 15 bp, Homo sapiens
agacgtctttattta

SEQ ID NO: 2125889 - DNA, 15 bp, Homo sapiens
gacgtctttatttat

SEQ ID NO: 2125890 - DNA, 15 bp, Homo sapiens
acgtctttatttatt

SEQ ID NO: 2125891 - DNA, 15 bp, Homo sapiens
cgtctttatttatta

SEQ ID NO: 2125892 - DNA, 15 bp, Homo sapiens
gtctttatttattag

SEQ ID NO: 2125893 - DNA, 15 bp, Homo sapiens
tctttatttattaga

SEQ ID NO: 2125894 - DNA, 15 bp, Homo sapiens
ctttatttattagaa

SEQ ID NO: 2125895 - DNA, 15 bp, Homo sapiens
tttatttattagaac

SEQ ID NO: 2125896 - DNA, 15 bp, Homo sapiens
ttatttattagaact

SEQ ID NO: 2125897 - DNA, 15 bp, Homo sapiens
tatttattagaacta

SEQ ID NO: 2125898 - DNA, 15 bp, Homo sapiens
atttattagaactac

SEQ ID NO: 2125899 - DNA, 15 bp, Homo sapiens
tttattagaactaca

SEQ ID NO: 2125900 - DNA, 15 bp, Homo sapiens
ttattagaactacac

SEQ ID NO: 2125901 - DNA, 15 bp, Homo sapiens
tattagaactacaca

SEQ ID NO: 2125902 - DNA, 15 bp, Homo sapiens
attagaactacacac

SEQ ID NO: 2125903 - DNA, 15 bp, Homo sapiens
ttagaactacacaca

SEQ ID NO: 2125904 - DNA, 15 bp, Homo sapiens
tagaactacacacaa

SEQ ID NO: 2125905 - DNA, 15 bp, Homo sapiens
agaactacacacaac

SEQ ID NO: 2125906 - DNA, 15 bp, Homo sapiens
gaactacacacaaca

SEQ ID NO: 2125907 - DNA, 15 bp, Homo sapiens
aactacacacaacag

SEQ ID NO: 2125908 - DNA, 15 bp, Homo sapiens
actacacacaacagg

SEQ ID NO: 2125909 - DNA, 15 bp, Homo sapiens
ctacacacaacagga

SEQ ID NO: 2125910 - DNA, 15 bp, Homo sapiens
tacacacaacaggac

SEQ ID NO: 2125911 - DNA, 15 bp, Homo sapiens
acacacaacaggact

SEQ ID NO: 2125912 - DNA, 15 bp, Homo sapiens
cacacaacaggacta

SEQ ID NO: 2125913 - DNA, 15 bp, Homo sapiens
acacaacaggactat

SEQ ID NO: 2125914 - DNA, 15 bp, Homo sapiens
cacaacaggactatt

SEQ ID NO: 2125915 - DNA, 15 bp, Homo sapiens
acaacaggactattc

SEQ ID NO: 2125916 - DNA, 15 bp, Homo sapiens
caacaggactattca

SEQ ID NO: 2125917 - DNA, 15 bp, Homo sapiens
aacaggactattcat

SEQ ID NO: 2125918 - DNA, 15 bp, Homo sapiens
acaggactattcatc

SEQ ID NO: 2125919 - DNA, 15 bp, Homo sapiens
caggactattcatca

SEQ ID NO: 2125920 - DNA, 15 bp, Homo sapiens
aggactattcatcaa

SEQ ID NO: 2125921 - DNA, 15 bp, Homo sapiens
ggactattcatcaac

SEQ ID NO: 2125922 - DNA, 15 bp, Homo sapiens
gactattcatcaact

SEQ ID NO: 2125923 - DNA, 15 bp, Homo sapiens
actattcatcaactt

SEQ ID NO: 2125924 - DNA, 15 bp, Homo sapiens
ctattcatcaacttc

SEQ ID NO: 2125925 - DNA, 15 bp, Homo sapiens
tattcatcaacttcc

SEQ ID NO: 2125926 - DNA, 15 bp, Homo sapiens
attcatcaacttccc

SEQ ID NO: 2125927 - DNA, 15 bp, Homo sapiens
ttcatcaacttcccc

SEQ ID NO: 2125928 - DNA, 15 bp, Homo sapiens
tcatcaacttccccc

SEQ ID NO: 2125929 - DNA, 15 bp, Homo sapiens
catcaacttccccca

SEQ ID NO: 2125930 - DNA, 15 bp, Homo sapiens
atcaacttcccccat

SEQ ID NO: 2125931 - DNA, 15 bp, Homo sapiens
tcaacttcccccatt

SEQ ID NO: 2125932 - DNA, 15 bp, Homo sapiens
caacttcccccattg

SEQ ID NO: 2125933 - DNA, 15 bp, Homo sapiens
aacttcccccattgc

SEQ ID NO: 2125934 - DNA, 15 bp, Homo sapiens
acttcccccattgca

SEQ ID NO: 2125935 - DNA, 15 bp, Homo sapiens
cttcccccattgcag

SEQ ID NO: 2125936 - DNA, 15 bp, Homo sapiens
ttcccccattgcaga

SEQ ID NO: 2125937 - DNA, 15 bp, Homo sapiens
tcccccattgcagac

SEQ ID NO: 2125938 - DNA, 15 bp, Homo sapiens
cccccattgcagaca

SEQ ID NO: 2125939 - DNA, 15 bp, Homo sapiens
ccccattgcagacag

SEQ ID NO: 2125940 - DNA, 15 bp, Homo sapiens
cccattgcagacagc

SEQ ID NO: 2125941 - DNA, 15 bp, Homo sapiens
ccattgcagacagcc

SEQ ID NO: 2125942 - DNA, 15 bp, Homo sapiens
cattgcagacagccc

SEQ ID NO: 2125943 - DNA, 15 bp, Homo sapiens
attgcagacagccct

SEQ ID NO: 2125944 - DNA, 15 bp, Homo sapiens
ttgcagacagccctt

SEQ ID NO: 2125945 - DNA, 15 bp, Homo sapiens
tgcagacagcccttt

SEQ ID NO: 2125946 - DNA, 15 bp, Homo sapiens
gcagacagccctttg

SEQ ID NO: 2125947 - DNA, 15 bp, Homo sapiens
cagacagccctttga

SEQ ID NO: 2125948 - DNA, 15 bp, Homo sapiens
agacagccctttgag

SEQ ID NO: 2125949 - DNA, 15 bp, Homo sapiens
gacagccctttgagt

SEQ ID NO: 2125950 - DNA, 15 bp, Homo sapiens
acagccctttgagtt

SEQ ID NO: 2125951 - DNA, 15 bp, Homo sapiens
cagccctttgagttg

SEQ ID NO: 2125952 - DNA, 15 bp, Homo sapiens
agccctttgagttgt

SEQ ID NO: 2125953 - DNA, 15 bp, Homo sapiens
gccctttgagttgta

SEQ ID NO: 2125954 - DNA, 15 bp, Homo sapiens
ccctttgagttgtaa

SEQ ID NO: 2125955 - DNA, 15 bp, Homo sapiens
cctttgagttgtaaa

SEQ ID NO: 2125956 - DNA, 15 bp, Homo sapiens
ctttgagttgtaaag

SEQ ID NO: 2125957 - DNA, 15 bp, Homo sapiens
tttgagttgtaaaga

SEQ ID NO: 2125958 - DNA, 15 bp, Homo sapiens
ttgagttgtaaagag

SEQ ID NO: 2125959 - DNA, 15 bp, Homo sapiens
tgagttgtaaagagc

SEQ ID NO: 2125960 - DNA, 15 bp, Homo sapiens
gagttgtaaagagcc

SEQ ID NO: 2125961 - DNA, 15 bp, Homo sapiens
agttgtaaagagccc

SEQ ID NO: 2125962 - DNA, 15 bp, Homo sapiens
gttgtaaagagccct

SEQ ID NO: 2125963 - DNA, 15 bp, Homo sapiens
ttgtaaagagccctt

SEQ ID NO: 2125964 - DNA, 15 bp, Homo sapiens
tgtaaagagcccttc

SEQ ID NO: 2125965 - DNA, 15 bp, Homo sapiens
gtaaagagcccttcc

SEQ ID NO: 2125966 - DNA, 15 bp, Homo sapiens
taaagagcccttccc

SEQ ID NO: 2125967 - DNA, 15 bp, Homo sapiens
aaagagcccttcccc

SEQ ID NO: 2125968 - DNA, 15 bp, Homo sapiens
aagagcccttcccca

SEQ ID NO: 2125969 - DNA, 15 bp, Homo sapiens
agagcccttccccag

SEQ ID NO: 2125970 - DNA, 15 bp, Homo sapiens
gagcccttccccagg

SEQ ID NO: 2125971 - DNA, 15 bp, Homo sapiens
agcccttccccaggt

SEQ ID NO: 2125972 - DNA, 15 bp, Homo sapiens
gcccttccccaggtc

SEQ ID NO: 2125973 - DNA, 15 bp, Homo sapiens
cccttccccaggtct

SEQ ID NO: 2125974 - DNA, 15 bp, Homo sapiens
ccttccccaggtctt

SEQ ID NO: 2125975 - DNA, 15 bp, Homo sapiens
cttccccaggtcttt

SEQ ID NO: 2125976 - DNA, 15 bp, Homo sapiens
ttccccaggtctttt

SEQ ID NO: 2125977 - DNA, 15 bp, Homo sapiens
tccccaggtctttta

SEQ ID NO: 2125978 - DNA, 15 bp, Homo sapiens
ccccaggtcttttat

SEQ ID NO: 2125979 - DNA, 15 bp, Homo sapiens
cccaggtcttttatt

SEQ ID NO: 2125980 - DNA, 15 bp, Homo sapiens
ccaggtcttttattt

SEQ ID NO: 2125981 - DNA, 15 bp, Homo sapiens
caggtcttttatttt

SEQ ID NO: 2125982 - DNA, 15 bp, Homo sapiens
aggtcttttattttc

SEQ ID NO: 2125983 - DNA, 15 bp, Homo sapiens
ggtcttttattttct

SEQ ID NO: 2125984 - DNA, 15 bp, Homo sapiens
gtcttttattttctt

SEQ ID NO: 2125985 - DNA, 15 bp, Homo sapiens
ttttattttcttttc

SEQ ID NO: 2125986 - DNA, 15 bp, Homo sapiens
tttattttcttttcc

SEQ ID NO: 2125987 - DNA, 15 bp, Homo sapiens
ttattttcttttcca

SEQ ID NO: 2125988 - DNA, 15 bp, Homo sapiens
tattttcttttccat

SEQ ID NO: 2125989 - DNA, 15 bp, Homo sapiens
attttcttttccata

SEQ ID NO: 2125990 - DNA, 15 bp, Homo sapiens
ttttcttttccataa

SEQ ID NO: 2125991 - DNA, 15 bp, Homo sapiens
tttcttttccataat

SEQ ID NO: 2125992 - DNA, 15 bp, Homo sapiens
ttcttttccataata

SEQ ID NO: 2125993 - DNA, 15 bp, Homo sapiens
tcttttccataatat

SEQ ID NO: 2125994 - DNA, 15 bp, Homo sapiens
cttttccataatatg

SEQ ID NO: 2125995 - DNA, 15 bp, Homo sapiens
ttttccataatatgt

SEQ ID NO: 2125996 - DNA, 15 bp, Homo sapiens
tttccataatatgtc

SEQ ID NO: 2125997 - DNA, 15 bp, Homo sapiens
ttccataatatgtcc

SEQ ID NO: 2125998 - DNA, 15 bp, Homo sapiens
tccataatatgtcct

SEQ ID NO: 2125999 - DNA, 15 bp, Homo sapiens
ccataatatgtcctg

SEQ ID NO: 2126000 - DNA, 15 bp, Homo sapiens
cataatatgtcctgg

SEQ ID NO: 2126001 - DNA, 15 bp, Homo sapiens
ataatatgtcctggt

SEQ ID NO: 2126002 - DNA, 15 bp, Homo sapiens
taatatgtcctggtc

SEQ ID NO: 2126003 - DNA, 15 bp, Homo sapiens
aatatgtcctggtcc

SEQ ID NO: 2126004 - DNA, 15 bp, Homo sapiens
atatgtcctggtccc

SEQ ID NO: 2126005 - DNA, 15 bp, Homo sapiens
tatgtcctggtccct

SEQ ID NO: 2126006 - DNA, 15 bp, Homo sapiens
atgtcctggtccctt

SEQ ID NO: 2126007 - DNA, 15 bp, Homo sapiens
tgtcctggtcccttt

SEQ ID NO: 2126008 - DNA, 15 bp, Homo sapiens
gtcctggtcccttta

SEQ ID NO: 2126009 - DNA, 15 bp, Homo sapiens
tcctggtccctttaa

SEQ ID NO: 2126010 - DNA, 15 bp, Homo sapiens
cctggtccctttaac

SEQ ID NO: 2126011 - DNA, 15 bp, Homo sapiens
ctggtccctttaact

SEQ ID NO: 2126012 - DNA, 15 bp, Homo sapiens
tggtccctttaactg

SEQ ID NO: 2126013 - DNA, 15 bp, Homo sapiens
ggtccctttaactgc

SEQ ID NO: 2126014 - DNA, 15 bp, Homo sapiens
gtccctttaactgct

SEQ ID NO: 2126015 - DNA, 15 bp, Homo sapiens
tccctttaactgctt

SEQ ID NO: 2126016 - DNA, 15 bp, Homo sapiens
ccctttaactgcttt

SEQ ID NO: 2126017 - DNA, 15 bp, Homo sapiens
cctttaactgctttt

SEQ ID NO: 2126018 - DNA, 15 bp, Homo sapiens
ctttaactgcttttc

SEQ ID NO: 2126019 - DNA, 15 bp, Homo sapiens
tttaactgcttttca

SEQ ID NO: 2126020 - DNA, 15 bp, Homo sapiens
ttaactgcttttcac

SEQ ID NO: 2126021 - DNA, 15 bp, Homo sapiens
taactgcttttcact

SEQ ID NO: 2126022 - DNA, 15 bp, Homo sapiens
aactgcttttcactg

SEQ ID NO: 2126023 - DNA, 15 bp, Homo sapiens
actgcttttcactgg

SEQ ID NO: 2126024 - DNA, 15 bp, Homo sapiens
ctgcttttcactggt

SEQ ID NO: 2126025 - DNA, 15 bp, Homo sapiens
tgcttttcactggtg

SEQ ID NO: 2126026 - DNA, 15 bp, Homo sapiens
gcttttcactggtga

SEQ ID NO: 2126027 - DNA, 15 bp, Homo sapiens
cttttcactggtgat

SEQ ID NO: 2126028 - DNA, 15 bp, Homo sapiens
ttttcactggtgatg

SEQ ID NO: 2126029 - DNA, 15 bp, Homo sapiens
tttcactggtgatga

SEQ ID NO: 2126030 - DNA, 15 bp, Homo sapiens
ttcactggtgatgat

SEQ ID NO: 2126031 - DNA, 15 bp, Homo sapiens
tcactggtgatgatt

SEQ ID NO: 2126032 - DNA, 15 bp, Homo sapiens
cactggtgatgattt

SEQ ID NO: 2126033 - DNA, 15 bp, Homo sapiens
actggtgatgatttg

SEQ ID NO: 2126034 - DNA, 15 bp, Homo sapiens
ctggtgatgatttgg

SEQ ID NO: 2126035 - DNA, 15 bp, Homo sapiens
tggtgatgatttgga

SEQ ID NO: 2126036 - DNA, 15 bp, Homo sapiens
ggtgatgatttggag

SEQ ID NO: 2126037 - DNA, 15 bp, Homo sapiens
gtgatgatttggagg

SEQ ID NO: 2126038 - DNA, 15 bp, Homo sapiens
tgatgatttggaggg

SEQ ID NO: 2126039 - DNA, 15 bp, Homo sapiens
gatgatttggagggc

SEQ ID NO: 2126040 - DNA, 15 bp, Homo sapiens
atgatttggagggcc

SEQ ID NO: 2126041 - DNA, 15 bp, Homo sapiens
tgatttggagggccc

SEQ ID NO: 2126042 - DNA, 15 bp, Homo sapiens
gatttggagggcccc

SEQ ID NO: 2126043 - DNA, 15 bp, Homo sapiens
atttggagggccccc

SEQ ID NO: 2126044 - DNA, 15 bp, Homo sapiens
tttggagggccccca

SEQ ID NO: 2126045 - DNA, 15 bp, Homo sapiens
ttggagggcccccac

SEQ ID NO: 2126046 - DNA, 15 bp, Homo sapiens
tggagggcccccacc

SEQ ID NO: 2126047 - DNA, 15 bp, Homo sapiens
ggagggcccccacca

SEQ ID NO: 2126048 - DNA, 15 bp, Homo sapiens
gagggcccccaccag

SEQ ID NO: 2126049 - DNA, 15 bp, Homo sapiens
agggcccccaccagc

SEQ ID NO: 2126050 - DNA, 15 bp, Homo sapiens
gggcccccaccagcc

SEQ ID NO: 2126051 - DNA, 15 bp, Homo sapiens
ggcccccaccagcct

SEQ ID NO: 2126052 - DNA, 15 bp, Homo sapiens
gcccccaccagcctg

SEQ ID NO: 2126053 - DNA, 15 bp, Homo sapiens
cccccaccagcctgc

SEQ ID NO: 2126054 - DNA, 15 bp, Homo sapiens
ccccaccagcctgct

SEQ ID NO: 2126055 - DNA, 15 bp, Homo sapiens
cccaccagcctgcta

SEQ ID NO: 2126056 - DNA, 15 bp, Homo sapiens
ccaccagcctgctaa

SEQ ID NO: 2126057 - DNA, 15 bp, Homo sapiens
caccagcctgctaat

SEQ ID NO: 2126058 - DNA, 15 bp, Homo sapiens
accagcctgctaatt

SEQ ID NO: 2126059 - DNA, 15 bp, Homo sapiens
ccagcctgctaatta

SEQ ID NO: 2126060 - DNA, 15 bp, Homo sapiens
cagcctgctaattag

SEQ ID NO: 2126061 - DNA, 15 bp, Homo sapiens
agcctgctaattaga

SEQ ID NO: 2126062 - DNA, 15 bp, Homo sapiens
gcctgctaattagat

SEQ ID NO: 2126063 - DNA, 15 bp, Homo sapiens
cctgctaattagatc

SEQ ID NO: 2126064 - DNA, 15 bp, Homo sapiens
ctgctaattagatcc

SEQ ID NO: 2126065 - DNA, 15 bp, Homo sapiens
tgctaattagatcct

SEQ ID NO: 2126066 - DNA, 15 bp, Homo sapiens
gctaattagatcctg

SEQ ID NO: 2126067 - DNA, 15 bp, Homo sapiens
ctaattagatcctga

SEQ ID NO: 2126068 - DNA, 15 bp, Homo sapiens
taattagatcctgaa

SEQ ID NO: 2126069 - DNA, 15 bp, Homo sapiens
aattagatcctgaag

SEQ ID NO: 2126070 - DNA, 15 bp, Homo sapiens
attagatcctgaagg

SEQ ID NO: 2126071 - DNA, 15 bp, Homo sapiens
ttagatcctgaaggc

SEQ ID NO: 2126072 - DNA, 15 bp, Homo sapiens
tagatcctgaaggct

SEQ ID NO: 2126073 - DNA, 15 bp, Homo sapiens
agatcctgaaggctt

SEQ ID NO: 2126074 - DNA, 15 bp, Homo sapiens
gatcctgaaggcttt

SEQ ID NO: 2126075 - DNA, 15 bp, Homo sapiens
atcctgaaggcttta

SEQ ID NO: 2126076 - DNA, 15 bp, Homo sapiens
tcctgaaggctttat

SEQ ID NO: 2126077 - DNA, 15 bp, Homo sapiens
cctgaaggctttatc

SEQ ID NO: 2126078 - DNA, 15 bp, Homo sapiens
ctgaaggctttatca

SEQ ID NO: 2126079 - DNA, 15 bp, Homo sapiens
tgaaggctttatcaa

SEQ ID NO: 2126080 - DNA, 15 bp, Homo sapiens
gaaggctttatcaaa

SEQ ID NO: 2126081 - DNA, 15 bp, Homo sapiens
aaggctttatcaaag

SEQ ID NO: 2126082 - DNA, 15 bp, Homo sapiens
aggctttatcaaagt

SEQ ID NO: 2126083 - DNA, 15 bp, Homo sapiens
ggctttatcaaagtc

SEQ ID NO: 2126084 - DNA, 15 bp, Homo sapiens
gctttatcaaagtcc

SEQ ID NO: 2126085 - DNA, 15 bp, Homo sapiens
ctttatcaaagtcct

SEQ ID NO: 2126086 - DNA, 15 bp, Homo sapiens
tttatcaaagtcctc

SEQ ID NO: 2126087 - DNA, 15 bp, Homo sapiens
ttatcaaagtcctct

SEQ ID NO: 2126088 - DNA, 15 bp, Homo sapiens
tatcaaagtcctctt

SEQ ID NO: 2126089 - DNA, 15 bp, Homo sapiens
atcaaagtcctcttt

SEQ ID NO: 2126090 - DNA, 15 bp, Homo sapiens
tcaaagtcctcttta

SEQ ID NO: 2126091 - DNA, 15 bp, Homo sapiens
caaagtcctctttaa

SEQ ID NO: 2126092 - DNA, 15 bp, Homo sapiens
aaagtcctctttaaa

SEQ ID NO: 2126093 - DNA, 15 bp, Homo sapiens
aagtcctctttaaat

SEQ ID NO: 2126094 - DNA, 15 bp, Homo sapiens
agtcctctttaaatg

SEQ ID NO: 2126095 - DNA, 15 bp, Homo sapiens
gtcctctttaaatgg

SEQ ID NO: 2126096 - DNA, 15 bp, Homo sapiens
tcctctttaaatggc

SEQ ID NO: 2126097 - DNA, 15 bp, Homo sapiens
cctctttaaatggca

SEQ ID NO: 2126098 - DNA, 15 bp, Homo sapiens
ctctttaaatggcat

SEQ ID NO: 2126099 - DNA, 15 bp, Homo sapiens
tctttaaatggcata

SEQ ID NO: 2126100 - DNA, 15 bp, Homo sapiens
ctttaaatggcatag

SEQ ID NO: 2126101 - DNA, 15 bp, Homo sapiens
tttaaatggcatagc

SEQ ID NO: 2126102 - DNA, 15 bp, Homo sapiens
ttaaatggcatagcc

SEQ ID NO: 2126103 - DNA, 15 bp, Homo sapiens
taaatggcatagccc

SEQ ID NO: 2126104 - DNA, 15 bp, Homo sapiens
aaatggcatagccct

SEQ ID NO: 2126105 - DNA, 15 bp, Homo sapiens
aatggcatagccctg

SEQ ID NO: 2126106 - DNA, 15 bp, Homo sapiens
atggcatagccctga

SEQ ID NO: 2126107 - DNA, 15 bp, Homo sapiens
tggcatagccctgaa

SEQ ID NO: 2126108 - DNA, 15 bp, Homo sapiens
ggcatagccctgaag

SEQ ID NO: 2126109 - DNA, 15 bp, Homo sapiens
gcatagccctgaagc

SEQ ID NO: 2126110 - DNA, 15 bp, Homo sapiens
catagccctgaagcc

SEQ ID NO: 2126111 - DNA, 15 bp, Homo sapiens
atagccctgaagcca

SEQ ID NO: 2126112 - DNA, 15 bp, Homo sapiens
tagccctgaagccaa

SEQ ID NO: 2126113 - DNA, 15 bp, Homo sapiens
agccctgaagccaag

SEQ ID NO: 2126114 - DNA, 15 bp, Homo sapiens
gccctgaagccaagg

SEQ ID NO: 2126115 - DNA, 15 bp, Homo sapiens
ccctgaagccaagga

SEQ ID NO: 2126116 - DNA, 15 bp, Homo sapiens
cctgaagccaaggac

SEQ ID NO: 2126117 - DNA, 15 bp, Homo sapiens
ctgaagccaaggaca

SEQ ID NO: 2126118 - DNA, 15 bp, Homo sapiens
tgaagccaaggacag

SEQ ID NO: 2126119 - DNA, 15 bp, Homo sapiens
gaagccaaggacaga

SEQ ID NO: 2126120 - DNA, 15 bp, Homo sapiens
aagccaaggacagac

SEQ ID NO: 2126121 - DNA, 15 bp, Homo sapiens
agccaaggacagact

SEQ ID NO: 2126122 - DNA, 15 bp, Homo sapiens
gccaaggacagactc

SEQ ID NO: 2126123 - DNA, 15 bp, Homo sapiens
ccaaggacagactcc

SEQ ID NO: 2126124 - DNA, 15 bp, Homo sapiens
caaggacagactcct

SEQ ID NO: 2126125 - DNA, 15 bp, Homo sapiens
aaggacagactcctg

SEQ ID NO: 2126126 - DNA, 15 bp, Homo sapiens
aggacagactcctgt

SEQ ID NO: 2126127 - DNA, 15 bp, Homo sapiens
ggacagactcctgtt

SEQ ID NO: 2126128 - DNA, 15 bp, Homo sapiens
gacagactcctgttt

SEQ ID NO: 2126129 - DNA, 15 bp, Homo sapiens
acagactcctgttta

SEQ ID NO: 2126130 - DNA, 15 bp, Homo sapiens
cagactcctgtttag

SEQ ID NO: 2126131 - DNA, 15 bp, Homo sapiens
agactcctgtttagt

SEQ ID NO: 2126132 - DNA, 15 bp, Homo sapiens
gactcctgtttagtg

SEQ ID NO: 2126133 - DNA, 15 bp, Homo sapiens
actcctgtttagtgg

SEQ ID NO: 2126134 - DNA, 15 bp, Homo sapiens
ctcctgtttagtggg

SEQ ID NO: 2126135 - DNA, 15 bp, Homo sapiens
tcctgtttagtgggg

SEQ ID NO: 2126136 - DNA, 15 bp, Homo sapiens
cctgtttagtggggg

SEQ ID NO: 2126137 - DNA, 15 bp, Homo sapiens
ctgtttagtgggggg

SEQ ID NO: 2126138 - DNA, 15 bp, Homo sapiens
tgtttagtgggggga

SEQ ID NO: 2126139 - DNA, 15 bp, Homo sapiens
gtttagtggggggag

SEQ ID NO: 2126140 - DNA, 15 bp, Homo sapiens
tttagtggggggagg

SEQ ID NO: 2126141 - DNA, 15 bp, Homo sapiens
ttagtggggggaggg

SEQ ID NO: 2126142 - DNA, 15 bp, Homo sapiens
tagtggggggagggg

SEQ ID NO: 2126143 - DNA, 15 bp, Homo sapiens
agtggggggaggggc

SEQ ID NO: 2126144 - DNA, 15 bp, Homo sapiens
gtggggggaggggct

SEQ ID NO: 2126145 - DNA, 15 bp, Homo sapiens
tggggggaggggctc

SEQ ID NO: 2126146 - DNA, 15 bp, Homo sapiens
ggggggaggggctct

SEQ ID NO: 2126147 - DNA, 15 bp, Homo sapiens
gggggaggggctctt

SEQ ID NO: 2126148 - DNA, 15 bp, Homo sapiens
ggggaggggctcttc

SEQ ID NO: 2126149 - DNA, 15 bp, Homo sapiens
gggaggggctcttca

SEQ ID NO: 2126150 - DNA, 15 bp, Homo sapiens
ggaggggctcttcaa

SEQ ID NO: 2126151 - DNA, 15 bp, Homo sapiens
gaggggctcttcaaa

SEQ ID NO: 2126152 - DNA, 15 bp, Homo sapiens
aggggctcttcaaat

SEQ ID NO: 2126153 - DNA, 15 bp, Homo sapiens
ggggctcttcaaatt

SEQ ID NO: 2126154 - DNA, 15 bp, Homo sapiens
gggctcttcaaatta

SEQ ID NO: 2126155 - DNA, 15 bp, Homo sapiens
ggctcttcaaattag

SEQ ID NO: 2126156 - DNA, 15 bp, Homo sapiens
gctcttcaaattaga

SEQ ID NO: 2126157 - DNA, 15 bp, Homo sapiens
ctcttcaaattagag

SEQ ID NO: 2126158 - DNA, 15 bp, Homo sapiens
tcttcaaattagagg

SEQ ID NO: 2126159 - DNA, 15 bp, Homo sapiens
cttcaaattagaggg

SEQ ID NO: 2126160 - DNA, 15 bp, Homo sapiens
ttcaaattagagggg

SEQ ID NO: 2126161 - DNA, 15 bp, Homo sapiens
tcaaattagaggggg

SEQ ID NO: 2126162 - DNA, 15 bp, Homo sapiens
caaattagagggggt

SEQ ID NO: 2126163 - DNA, 15 bp, Homo sapiens
aaattagagggggtt

SEQ ID NO: 2126164 - DNA, 15 bp, Homo sapiens
aattagagggggttg

SEQ ID NO: 2126165 - DNA, 15 bp, Homo sapiens
attagagggggttga

SEQ ID NO: 2126166 - DNA, 15 bp, Homo sapiens
ttagagggggttgag

SEQ ID NO: 2126167 - DNA, 15 bp, Homo sapiens
tagagggggttgagc

SEQ ID NO: 2126168 - DNA, 15 bp, Homo sapiens
agagggggttgagca

SEQ ID NO: 2126169 - DNA, 15 bp, Homo sapiens
gagggggttgagcac

SEQ ID NO: 2126170 - DNA, 15 bp, Homo sapiens
agggggttgagcact

SEQ ID NO: 2126171 - DNA, 15 bp, Homo sapiens
gggggttgagcactt

SEQ ID NO: 2126172 - DNA, 15 bp, Homo sapiens
ggggttgagcacttt

SEQ ID NO: 2126173 - DNA, 15 bp, Homo sapiens
gggttgagcactttt

SEQ ID NO: 2126174 - DNA, 15 bp, Homo sapiens
ggttgagcacttttc

SEQ ID NO: 2126175 - DNA, 15 bp, Homo sapiens
gttgagcacttttct

SEQ ID NO: 2126176 - DNA, 15 bp, Homo sapiens
ttgagcacttttctt

SEQ ID NO: 2126177 - DNA, 15 bp, Homo sapiens
tgagcacttttcttt

SEQ ID NO: 2126178 - DNA, 15 bp, Homo sapiens
gagcacttttctttg

SEQ ID NO: 2126179 - DNA, 15 bp, Homo sapiens
agcacttttctttga

SEQ ID NO: 2126180 - DNA, 15 bp, Homo sapiens
gcacttttctttgac

SEQ ID NO: 2126181 - DNA, 15 bp, Homo sapiens
cacttttctttgacc

SEQ ID NO: 2126182 - DNA, 15 bp, Homo sapiens
acttttctttgaccc

SEQ ID NO: 2126183 - DNA, 15 bp, Homo sapiens
cttttctttgaccct

SEQ ID NO: 2126184 - DNA, 15 bp, Homo sapiens
ttttctttgaccctt

SEQ ID NO: 2126185 - DNA, 15 bp, Homo sapiens
tttctttgacccttt

SEQ ID NO: 2126186 - DNA, 15 bp, Homo sapiens
ttctttgaccctttc

SEQ ID NO: 2126187 - DNA, 15 bp, Homo sapiens
tctttgaccctttct

SEQ ID NO: 2126188 - DNA, 15 bp, Homo sapiens
ctttgaccctttctt

SEQ ID NO: 2126189 - DNA, 15 bp, Homo sapiens
tttgaccctttcttc

SEQ ID NO: 2126190 - DNA, 15 bp, Homo sapiens
ttgaccctttcttct

SEQ ID NO: 2126191 - DNA, 15 bp, Homo sapiens
tgaccctttcttctg

SEQ ID NO: 2126192 - DNA, 15 bp, Homo sapiens
gaccctttcttctga

SEQ ID NO: 2126193 - DNA, 15 bp, Homo sapiens
accctttcttctgat

SEQ ID NO: 2126194 - DNA, 15 bp, Homo sapiens
ccctttcttctgata

SEQ ID NO: 2126195 - DNA, 15 bp, Homo sapiens
cctttcttctgatac

SEQ ID NO: 2126196 - DNA, 15 bp, Homo sapiens
ctttcttctgatact

SEQ ID NO: 2126197 - DNA, 15 bp, Homo sapiens
tttcttctgatactg

SEQ ID NO: 2126198 - DNA, 15 bp, Homo sapiens
ttcttctgatactga

SEQ ID NO: 2126199 - DNA, 15 bp, Homo sapiens
tcttctgatactgac

SEQ ID NO: 2126200 - DNA, 15 bp, Homo sapiens
cttctgatactgacc

SEQ ID NO: 2126201 - DNA, 15 bp, Homo sapiens
ttctgatactgacct

SEQ ID NO: 2126202 - DNA, 15 bp, Homo sapiens
tctgatactgacctt

SEQ ID NO: 2126203 - DNA, 15 bp, Homo sapiens
ctgatactgaccttg

SEQ ID NO: 2126204 - DNA, 15 bp, Homo sapiens
tgatactgaccttgt

SEQ ID NO: 2126205 - DNA, 15 bp, Homo sapiens
gatactgaccttgta

SEQ ID NO: 2126206 - DNA, 15 bp, Homo sapiens
atactgaccttgtat

SEQ ID NO: 2126207 - DNA, 15 bp, Homo sapiens
tactgaccttgtatg

SEQ ID NO: 2126208 - DNA, 15 bp, Homo sapiens
actgaccttgtatga

SEQ ID NO: 2126209 - DNA, 15 bp, Homo sapiens
ctgaccttgtatgaa

SEQ ID NO: 2126210 - DNA, 15 bp, Homo sapiens
tgaccttgtatgaat

SEQ ID NO: 2126211 - DNA, 15 bp, Homo sapiens
gaccttgtatgaatc

SEQ ID NO: 2126212 - DNA, 15 bp, Homo sapiens
accttgtatgaatca

SEQ ID NO: 2126213 - DNA, 15 bp, Homo sapiens
ccttgtatgaatcag

SEQ ID NO: 2126214 - DNA, 15 bp, Homo sapiens
cttgtatgaatcaga

SEQ ID NO: 2126215 - DNA, 15 bp, Homo sapiens
ttgtatgaatcagac

SEQ ID NO: 2126216 - DNA, 15 bp, Homo sapiens
tgtatgaatcagact

SEQ ID NO: 2126217 - DNA, 15 bp, Homo sapiens
gtatgaatcagactt

SEQ ID NO: 2126218 - DNA, 15 bp, Homo sapiens
tatgaatcagacttt

SEQ ID NO: 2126219 - DNA, 15 bp, Homo sapiens
atgaatcagactttc

SEQ ID NO: 2126220 - DNA, 15 bp, Homo sapiens
tgaatcagactttcc

SEQ ID NO: 2126221 - DNA, 15 bp, Homo sapiens
gaatcagactttccc

SEQ ID NO: 2126222 - DNA, 15 bp, Homo sapiens
aatcagactttcccc

SEQ ID NO: 2126223 - DNA, 15 bp, Homo sapiens
atcagactttccccc

SEQ ID NO: 2126224 - DNA, 15 bp, Homo sapiens
tcagactttcccccc

SEQ ID NO: 2126225 - DNA, 15 bp, Homo sapiens
cagactttcccccct

SEQ ID NO: 2126226 - DNA, 15 bp, Homo sapiens
agactttcccccctt

SEQ ID NO: 2126227 - DNA, 15 bp, Homo sapiens
gactttccccccttt

SEQ ID NO: 2126228 - DNA, 15 bp, Homo sapiens
actttccccccttta

SEQ ID NO: 2126229 - DNA, 15 bp, Homo sapiens
ctttcccccctttat

SEQ ID NO: 2126230 - DNA, 15 bp, Homo sapiens
tttcccccctttata

SEQ ID NO: 2126231 - DNA, 15 bp, Homo sapiens
ttcccccctttatat

SEQ ID NO: 2126232 - DNA, 15 bp, Homo sapiens
tcccccctttatatc

SEQ ID NO: 2126233 - DNA, 15 bp, Homo sapiens
cccccctttatatca

SEQ ID NO: 2126234 - DNA, 15 bp, Homo sapiens
ccccctttatatcag

SEQ ID NO: 2126235 - DNA, 15 bp, Homo sapiens
cccctttatatcaga

SEQ ID NO: 2126236 - DNA, 15 bp, Homo sapiens
ccctttatatcagat

SEQ ID NO: 2126237 - DNA, 15 bp, Homo sapiens
cctttatatcagatt

SEQ ID NO: 2126238 - DNA, 15 bp, Homo sapiens
ctttatatcagattc

SEQ ID NO: 2126239 - DNA, 15 bp, Homo sapiens
tttatatcagattct

SEQ ID NO: 2126240 - DNA, 15 bp, Homo sapiens
ttatatcagattctg

SEQ ID NO: 2126241 - DNA, 15 bp, Homo sapiens
tatatcagattctgg

SEQ ID NO: 2126242 - DNA, 15 bp, Homo sapiens
atatcagattctggt

SEQ ID NO: 2126243 - DNA, 15 bp, Homo sapiens
tatcagattctggtc

SEQ ID NO: 2126244 - DNA, 15 bp, Homo sapiens
atcagattctggtcc

SEQ ID NO: 2126245 - DNA, 15 bp, Homo sapiens
tcagattctggtcct

SEQ ID NO: 2126246 - DNA, 15 bp, Homo sapiens
cagattctggtcctg

SEQ ID NO: 2126247 - DNA, 15 bp, Homo sapiens
agattctggtcctgc

SEQ ID NO: 2126248 - DNA, 15 bp, Homo sapiens
gattctggtcctgcc

SEQ ID NO: 2126249 - DNA, 15 bp, Homo sapiens
attctggtcctgccc

SEQ ID NO: 2126250 - DNA, 15 bp, Homo sapiens
ttctggtcctgccct

SEQ ID NO: 2126251 - DNA, 15 bp, Homo sapiens
tctggtcctgccctg

SEQ ID NO: 2126252 - DNA, 15 bp, Homo sapiens
ctggtcctgccctgt

SEQ ID NO: 2126253 - DNA, 15 bp, Homo sapiens
tggtcctgccctgta

SEQ ID NO: 2126254 - DNA, 15 bp, Homo sapiens
ggtcctgccctgtat

SEQ ID NO: 2126255 - DNA, 15 bp, Homo sapiens
gtcctgccctgtata

SEQ ID NO: 2126256 - DNA, 15 bp, Homo sapiens
tcctgccctgtatac

SEQ ID NO: 2126257 - DNA, 15 bp, Homo sapiens
cctgccctgtataca

SEQ ID NO: 2126258 - DNA, 15 bp, Homo sapiens
ctgccctgtatacaa

SEQ ID NO: 2126259 - DNA, 15 bp, Homo sapiens
tgccctgtatacaac

SEQ ID NO: 2126260 - DNA, 15 bp, Homo sapiens
gccctgtatacaact

SEQ ID NO: 2126261 - DNA, 15 bp, Homo sapiens
ccctgtatacaactt

SEQ ID NO: 2126262 - DNA, 15 bp, Homo sapiens
cctgtatacaacttt

SEQ ID NO: 2126263 - DNA, 15 bp, Homo sapiens
ctgtatacaactttg

SEQ ID NO: 2126264 - DNA, 15 bp, Homo sapiens
tgtatacaactttgg

SEQ ID NO: 2126265 - DNA, 15 bp, Homo sapiens
gtatacaactttggc

SEQ ID NO: 2126266 - DNA, 15 bp, Homo sapiens
tatacaactttggct

SEQ ID NO: 2126267 - DNA, 15 bp, Homo sapiens
atacaactttggctc

SEQ ID NO: 2126268 - DNA, 15 bp, Homo sapiens
tacaactttggctcc

SEQ ID NO: 2126269 - DNA, 15 bp, Homo sapiens
acaactttggctcct

SEQ ID NO: 2126270 - DNA, 15 bp, Homo sapiens
caactttggctcctt

SEQ ID NO: 2126271 - DNA, 15 bp, Homo sapiens
aactttggctccttt

SEQ ID NO: 2126272 - DNA, 15 bp, Homo sapiens
actttggctcctttc

SEQ ID NO: 2126273 - DNA, 15 bp, Homo sapiens
ctttggctcctttcc

SEQ ID NO: 2126274 - DNA, 15 bp, Homo sapiens
tttggctcctttcct

SEQ ID NO: 2126275 - DNA, 15 bp, Homo sapiens
ttggctcctttcctg

SEQ ID NO: 2126276 - DNA, 15 bp, Homo sapiens
tggctcctttcctgc

SEQ ID NO: 2126277 - DNA, 15 bp, Homo sapiens
ggctcctttcctgca

SEQ ID NO: 2126278 - DNA, 15 bp, Homo sapiens
gctcctttcctgcag

SEQ ID NO: 2126279 - DNA, 15 bp, Homo sapiens
ctcctttcctgcaga

SEQ ID NO: 2126280 - DNA, 15 bp, Homo sapiens
tcctttcctgcagac

SEQ ID NO: 2126281 - DNA, 15 bp, Homo sapiens
cctttcctgcagaca

SEQ ID NO: 2126282 - DNA, 15 bp, Homo sapiens
ctttcctgcagacag

SEQ ID NO: 2126283 - DNA, 15 bp, Homo sapiens
tttcctgcagacagg

SEQ ID NO: 2126284 - DNA, 15 bp, Homo sapiens
ttcctgcagacaggc

SEQ ID NO: 2126285 - DNA, 15 bp, Homo sapiens
tcctgcagacaggct

SEQ ID NO: 2126286 - DNA, 15 bp, Homo sapiens
cctgcagacaggctc

SEQ ID NO: 2126287 - DNA, 15 bp, Homo sapiens
ctgcagacaggctca

SEQ ID NO: 2126288 - DNA, 15 bp, Homo sapiens
tgcagacaggctcag

SEQ ID NO: 2126289 - DNA, 15 bp, Homo sapiens
gcagacaggctcagt

SEQ ID NO: 2126290 - DNA, 15 bp, Homo sapiens
cagacaggctcagtg

SEQ ID NO: 2126291 - DNA, 15 bp, Homo sapiens
agacaggctcagtgc

SEQ ID NO: 2126292 - DNA, 15 bp, Homo sapiens
gacaggctcagtgct

SEQ ID NO: 2126293 - DNA, 15 bp, Homo sapiens
acaggctcagtgctt

SEQ ID NO: 2126294 - DNA, 15 bp, Homo sapiens
caggctcagtgcttc

SEQ ID NO: 2126295 - DNA, 15 bp, Homo sapiens
aggctcagtgcttct

SEQ ID NO: 2126296 - DNA, 15 bp, Homo sapiens
ggctcagtgcttctt

SEQ ID NO: 2126297 - DNA, 15 bp, Homo sapiens
ctcagtgcttctttg

SEQ ID NO: 2126298 - DNA, 15 bp, Homo sapiens
tcagtgcttctttgg

SEQ ID NO: 2126299 - DNA, 15 bp, Homo sapiens
cagtgcttctttggt

SEQ ID NO: 2126300 - DNA, 15 bp, Homo sapiens
agtgcttctttggtg

SEQ ID NO: 2126301 - DNA, 15 bp, Homo sapiens
gtgcttctttggtga

SEQ ID NO: 2126302 - DNA, 15 bp, Homo sapiens
tgcttctttggtgat

SEQ ID NO: 2126303 - DNA, 15 bp, Homo sapiens
gcttctttggtgatt

SEQ ID NO: 2126304 - DNA, 15 bp, Homo sapiens
cttctttggtgattt

SEQ ID NO: 2126305 - DNA, 15 bp, Homo sapiens
ttctttggtgatttt

SEQ ID NO: 2126306 - DNA, 15 bp, Homo sapiens
tctttggtgatttta

SEQ ID NO: 2126307 - DNA, 15 bp, Homo sapiens
ctttggtgattttat

SEQ ID NO: 2126308 - DNA, 15 bp, Homo sapiens
tttggtgattttatg

SEQ ID NO: 2126309 - DNA, 15 bp, Homo sapiens
ttggtgattttatgc

SEQ ID NO: 2126310 - DNA, 15 bp, Homo sapiens
tggtgattttatgct

SEQ ID NO: 2126311 - DNA, 15 bp, Homo sapiens
ggtgattttatgctg

SEQ ID NO: 2126312 - DNA, 15 bp, Homo sapiens
gtgattttatgctgc

SEQ ID NO: 2126313 - DNA, 15 bp, Homo sapiens
tgattttatgctgcc

SEQ ID NO: 2126314 - DNA, 15 bp, Homo sapiens
gattttatgctgcca

SEQ ID NO: 2126315 - DNA, 15 bp, Homo sapiens
attttatgctgccat

SEQ ID NO: 2126316 - DNA, 15 bp, Homo sapiens
ttttatgctgccatc

SEQ ID NO: 2126317 - DNA, 15 bp, Homo sapiens
tttatgctgccatct

SEQ ID NO: 2126318 - DNA, 15 bp, Homo sapiens
ttatgctgccatctg

SEQ ID NO: 2126319 - DNA, 15 bp, Homo sapiens
tatgctgccatctgg

SEQ ID NO: 2126320 - DNA, 15 bp, Homo sapiens
atgctgccatctggt

SEQ ID NO: 2126321 - DNA, 15 bp, Homo sapiens
tgctgccatctggtg

SEQ ID NO: 2126322 - DNA, 15 bp, Homo sapiens
gctgccatctggtgg

SEQ ID NO: 2126323 - DNA, 15 bp, Homo sapiens
gccatctggtggcta

SEQ ID NO: 2126324 - DNA, 15 bp, Homo sapiens
ccatctggtggctaa

SEQ ID NO: 2126325 - DNA, 15 bp, Homo sapiens
catctggtggctaag

SEQ ID NO: 2126326 - DNA, 15 bp, Homo sapiens
atctggtggctaagt

SEQ ID NO: 2126327 - DNA, 15 bp, Homo sapiens
tctggtggctaagtc

SEQ ID NO: 2126328 - DNA, 15 bp, Homo sapiens
ctggtggctaagtcg

SEQ ID NO: 2126329 - DNA, 15 bp, Homo sapiens
tggtggctaagtcga

SEQ ID NO: 2126330 - DNA, 15 bp, Homo sapiens
ggtggctaagtcgac

SEQ ID NO: 2126331 - DNA, 15 bp, Homo sapiens
gtggctaagtcgaca

SEQ ID NO: 2126332 - DNA, 15 bp, Homo sapiens
tggctaagtcgacag

SEQ ID NO: 2126333 - DNA, 15 bp, Homo sapiens
ggctaagtcgacagt

SEQ ID NO: 2126334 - DNA, 15 bp, Homo sapiens
gctaagtcgacagtg

SEQ ID NO: 2126335 - DNA, 15 bp, Homo sapiens
ctaagtcgacagtgc

SEQ ID NO: 2126336 - DNA, 15 bp, Homo sapiens
taagtcgacagtgcc

SEQ ID NO: 2126337 - DNA, 15 bp, Homo sapiens
aagtcgacagtgccg

SEQ ID NO: 2126338 - DNA, 15 bp, Homo sapiens
agtcgacagtgccgg

SEQ ID NO: 2126339 - DNA, 15 bp, Homo sapiens
gtcgacagtgccggc

SEQ ID NO: 2126340 - DNA, 15 bp, Homo sapiens
tcgacagtgccggct

SEQ ID NO: 2126341 - DNA, 15 bp, Homo sapiens
cgacagtgccggctt

SEQ ID NO: 2126342 - DNA, 15 bp, Homo sapiens
gacagtgccggcttt

SEQ ID NO: 2126343 - DNA, 15 bp, Homo sapiens
acagtgccggctttt

SEQ ID NO: 2126344 - DNA, 15 bp, Homo sapiens
cagtgccggcttttt

SEQ ID NO: 2126345 - DNA, 15 bp, Homo sapiens
agtgccggctttttt

SEQ ID NO: 2126346 - DNA, 15 bp, Homo sapiens
gtgccggcttttttt

SEQ ID NO: 2126347 - DNA, 15 bp, Homo sapiens
tgccggctttttttg

SEQ ID NO: 2126348 - DNA, 15 bp, Homo sapiens
gccggctttttttgg

SEQ ID NO: 2126349 - DNA, 15 bp, Homo sapiens
ccggctttttttggg

SEQ ID NO: 2126350 - DNA, 15 bp, Homo sapiens
cggctttttttgggc

SEQ ID NO: 2126351 - DNA, 15 bp, Homo sapiens
ggctttttttgggcc

SEQ ID NO: 2126352 - DNA, 15 bp, Homo sapiens
gctttttttgggcct

SEQ ID NO: 2126353 - DNA, 15 bp, Homo sapiens
ctttttttgggccta

SEQ ID NO: 2126354 - DNA, 15 bp, Homo sapiens
tttttttgggcctaa

SEQ ID NO: 2126355 - DNA, 15 bp, Homo sapiens
ttttttgggcctaat

SEQ ID NO: 2126356 - DNA, 15 bp, Homo sapiens
tttttgggcctaatt

SEQ ID NO: 2126357 - DNA, 15 bp, Homo sapiens
ttttgggcctaattt

SEQ ID NO: 2126358 - DNA, 15 bp, Homo sapiens
tttgggcctaattta

SEQ ID NO: 2126359 - DNA, 15 bp, Homo sapiens
tgggcctaatttagc

SEQ ID NO: 2126360 - DNA, 15 bp, Homo sapiens
gggcctaatttagca

SEQ ID NO: 2126361 - DNA, 15 bp, Homo sapiens
ggcctaatttagcag

SEQ ID NO: 2126362 - DNA, 15 bp, Homo sapiens
gcctaatttagcaga

SEQ ID NO: 2126363 - DNA, 15 bp, Homo sapiens
cctaatttagcagag

SEQ ID NO: 2126364 - DNA, 15 bp, Homo sapiens
ctaatttagcagagg

SEQ ID NO: 2126365 - DNA, 15 bp, Homo sapiens
taatttagcagagga

SEQ ID NO: 2126366 - DNA, 15 bp, Homo sapiens
aatttagcagaggag

SEQ ID NO: 2126367 - DNA, 15 bp, Homo sapiens
atttagcagaggaga

SEQ ID NO: 2126368 - DNA, 15 bp, Homo sapiens
tttagcagaggagag

SEQ ID NO: 2126369 - DNA, 15 bp, Homo sapiens
ttagcagaggagagg

SEQ ID NO: 2126370 - DNA, 15 bp, Homo sapiens
tagcagaggagagga

SEQ ID NO: 2126371 - DNA, 15 bp, Homo sapiens
agcagaggagaggat

SEQ ID NO: 2126372 - DNA, 15 bp, Homo sapiens
gcagaggagaggatg

SEQ ID NO: 2126373 - DNA, 15 bp, Homo sapiens
cagaggagaggatgt

SEQ ID NO: 2126374 - DNA, 15 bp, Homo sapiens
agaggagaggatgta

SEQ ID NO: 2126375 - DNA, 15 bp, Homo sapiens
gaggagaggatgtac

SEQ ID NO: 2126376 - DNA, 15 bp, Homo sapiens
aggagaggatgtaca

SEQ ID NO: 2126377 - DNA, 15 bp, Homo sapiens
ggagaggatgtacag

SEQ ID NO: 2126378 - DNA, 15 bp, Homo sapiens
gagaggatgtacaga

SEQ ID NO: 2126379 - DNA, 15 bp, Homo sapiens
agaggatgtacagat

SEQ ID NO: 2126380 - DNA, 15 bp, Homo sapiens
gaggatgtacagatg

SEQ ID NO: 2126381 - DNA, 15 bp, Homo sapiens
aggatgtacagatga

SEQ ID NO: 2126382 - DNA, 15 bp, Homo sapiens
ggatgtacagatgaa

SEQ ID NO: 2126383 - DNA, 15 bp, Homo sapiens
gatgtacagatgaac

SEQ ID NO: 2126384 - DNA, 15 bp, Homo sapiens
atgtacagatgaaca

SEQ ID NO: 2126385 - DNA, 15 bp, Homo sapiens
tgtacagatgaacat

SEQ ID NO: 2126386 - DNA, 15 bp, Homo sapiens
gtacagatgaacata

SEQ ID NO: 2126387 - DNA, 15 bp, Homo sapiens
tacagatgaacatag

SEQ ID NO: 2126388 - DNA, 15 bp, Homo sapiens
acagatgaacatagt

SEQ ID NO: 2126389 - DNA, 15 bp, Homo sapiens
cagatgaacatagtg

SEQ ID NO: 2126390 - DNA, 15 bp, Homo sapiens
agatgaacatagtga

SEQ ID NO: 2126391 - DNA, 15 bp, Homo sapiens
gatgaacatagtgac

SEQ ID NO: 2126392 - DNA, 15 bp, Homo sapiens
atgaacatagtgaca

SEQ ID NO: 2126393 - DNA, 15 bp, Homo sapiens
tgaacatagtgacaa

SEQ ID NO: 2126394 - DNA, 15 bp, Homo sapiens
gaacatagtgacaat

SEQ ID NO: 2126395 - DNA, 15 bp, Homo sapiens
aacatagtgacaatc

SEQ ID NO: 2126396 - DNA, 15 bp, Homo sapiens
acatagtgacaatcc

SEQ ID NO: 2126397 - DNA, 15 bp, Homo sapiens
catagtgacaatcct

SEQ ID NO: 2126398 - DNA, 15 bp, Homo sapiens
atagtgacaatccta

SEQ ID NO: 2126399 - DNA, 15 bp, Homo sapiens
tagtgacaatcctag

SEQ ID NO: 2126400 - DNA, 15 bp, Homo sapiens
agtgacaatcctaga

SEQ ID NO: 2126401 - DNA, 15 bp, Homo sapiens
gtgacaatcctagaa

SEQ ID NO: 2126402 - DNA, 15 bp, Homo sapiens
tgacaatcctagaac

SEQ ID NO: 2126403 - DNA, 15 bp, Homo sapiens
gacaatcctagaact

SEQ ID NO: 2126404 - DNA, 15 bp, Homo sapiens
acaatcctagaactg

SEQ ID NO: 2126405 - DNA, 15 bp, Homo sapiens
caatcctagaactgg

SEQ ID NO: 2126406 - DNA, 15 bp, Homo sapiens
aatcctagaactgga

SEQ ID NO: 2126407 - DNA, 15 bp, Homo sapiens
atcctagaactggaa

SEQ ID NO: 2126408 - DNA, 15 bp, Homo sapiens
tcctagaactggaat

SEQ ID NO: 2126409 - DNA, 15 bp, Homo sapiens
cctagaactggaata

SEQ ID NO: 2126410 - DNA, 15 bp, Homo sapiens
ctagaactggaataa

SEQ ID NO: 2126411 - DNA, 15 bp, Homo sapiens
tagaactggaataat

SEQ ID NO: 2126412 - DNA, 15 bp, Homo sapiens
gaactggaataatct

SEQ ID NO: 2126413 - DNA, 15 bp, Homo sapiens
aactggaataatctg

SEQ ID NO: 2126414 - DNA, 15 bp, Homo sapiens
actggaataatctga

SEQ ID NO: 2126415 - DNA, 15 bp, Homo sapiens
ctggaataatctgaa

SEQ ID NO: 2126416 - DNA, 15 bp, Homo sapiens
tggaataatctgaat

SEQ ID NO: 2126417 - DNA, 15 bp, Homo sapiens
ggaataatctgaatc

SEQ ID NO: 2126418 - DNA, 15 bp, Homo sapiens
gaataatctgaatct

SEQ ID NO: 2126419 - DNA, 15 bp, Homo sapiens
aataatctgaatctt

SEQ ID NO: 2126420 - DNA, 15 bp, Homo sapiens
ataatctgaatcttt

SEQ ID NO: 2126421 - DNA, 15 bp, Homo sapiens
taatctgaatcttta

SEQ ID NO: 2126422 - DNA, 15 bp, Homo sapiens
aatctgaatctttaa

SEQ ID NO: 2126423 - DNA, 15 bp, Homo sapiens
atctgaatctttaaa

SEQ ID NO: 2126424 - DNA, 15 bp, Homo sapiens
tctgaatctttaaaa

SEQ ID NO: 2126425 - DNA, 15 bp, Homo sapiens
ctgaatctttaaaaa

SEQ ID NO: 2126426 - DNA, 15 bp, Homo sapiens
tgaatctttaaaaag

SEQ ID NO: 2126427 - DNA, 15 bp, Homo sapiens
gaatctttaaaaaga

SEQ ID NO: 2126428 - DNA, 15 bp, Homo sapiens
aatctttaaaaagag

SEQ ID NO: 2126429 - DNA, 15 bp, Homo sapiens
atctttaaaaagagg

SEQ ID NO: 2126430 - DNA, 15 bp, Homo sapiens
tctttaaaaagagga

SEQ ID NO: 2126431 - DNA, 15 bp, Homo sapiens
ctttaaaaagaggac

SEQ ID NO: 2126432 - DNA, 15 bp, Homo sapiens
tttaaaaagaggacc

SEQ ID NO: 2126433 - DNA, 15 bp, Homo sapiens
ttaaaaagaggacct

SEQ ID NO: 2126434 - DNA, 15 bp, Homo sapiens
taaaaagaggacctg

SEQ ID NO: 2126435 - DNA, 15 bp, Homo sapiens
aaaaagaggacctga

SEQ ID NO: 2126436 - DNA, 15 bp, Homo sapiens
aaaagaggacctgat

SEQ ID NO: 2126437 - DNA, 15 bp, Homo sapiens
aaagaggacctgatt

SEQ ID NO: 2126438 - DNA, 15 bp, Homo sapiens
aagaggacctgattt

SEQ ID NO: 2126439 - DNA, 15 bp, Homo sapiens
agaggacctgatttc

SEQ ID NO: 2126440 - DNA, 15 bp, Homo sapiens
gaggacctgatttct

SEQ ID NO: 2126441 - DNA, 15 bp, Homo sapiens
aggacctgatttctt

SEQ ID NO: 2126442 - DNA, 15 bp, Homo sapiens
ggacctgatttcttc

SEQ ID NO: 2126443 - DNA, 15 bp, Homo sapiens
gacctgatttcttcc

SEQ ID NO: 2126444 - DNA, 15 bp, Homo sapiens
acctgatttcttcct

SEQ ID NO: 2126445 - DNA, 15 bp, Homo sapiens
cctgatttcttccta

SEQ ID NO: 2126446 - DNA, 15 bp, Homo sapiens
ctgatttcttcctat

SEQ ID NO: 2126447 - DNA, 15 bp, Homo sapiens
tgatttcttcctatt

SEQ ID NO: 2126448 - DNA, 15 bp, Homo sapiens
gatttcttcctattg

SEQ ID NO: 2126449 - DNA, 15 bp, Homo sapiens
atttcttcctattgt

SEQ ID NO: 2126450 - DNA, 15 bp, Homo sapiens
tttcttcctattgtg

SEQ ID NO: 2126451 - DNA, 15 bp, Homo sapiens
ttcttcctattgtgt

SEQ ID NO: 2126452 - DNA, 15 bp, Homo sapiens
tcttcctattgtgtg

SEQ ID NO: 2126453 - DNA, 15 bp, Homo sapiens
cttcctattgtgtgc

SEQ ID NO: 2126454 - DNA, 15 bp, Homo sapiens
ttcctattgtgtgcc

SEQ ID NO: 2126455 - DNA, 15 bp, Homo sapiens
tcctattgtgtgcca

SEQ ID NO: 2126456 - DNA, 15 bp, Homo sapiens
cctattgtgtgccat

SEQ ID NO: 2126457 - DNA, 15 bp, Homo sapiens
ctattgtgtgccatg

SEQ ID NO: 2126458 - DNA, 15 bp, Homo sapiens
tattgtgtgccatgt

SEQ ID NO: 2126459 - DNA, 15 bp, Homo sapiens
attgtgtgccatgtg

SEQ ID NO: 2126460 - DNA, 15 bp, Homo sapiens
ttgtgtgccatgtga

SEQ ID NO: 2126461 - DNA, 15 bp, Homo sapiens
tgtgtgccatgtgat

SEQ ID NO: 2126462 - DNA, 15 bp, Homo sapiens
gtgtgccatgtgatt

SEQ ID NO: 2126463 - DNA, 15 bp, Homo sapiens
tgtgccatgtgattg

SEQ ID NO: 2126464 - DNA, 15 bp, Homo sapiens
gtgccatgtgattgg

SEQ ID NO: 2126465 - DNA, 15 bp, Homo sapiens
tgccatgtgattggg

SEQ ID NO: 2126466 - DNA, 15 bp, Homo sapiens
gccatgtgattggga

SEQ ID NO: 2126467 - DNA, 15 bp, Homo sapiens
ccatgtgattgggag

SEQ ID NO: 2126468 - DNA, 15 bp, Homo sapiens
catgtgattgggagc

SEQ ID NO: 2126469 - DNA, 15 bp, Homo sapiens
atgtgattgggagcc

SEQ ID NO: 2126470 - DNA, 15 bp, Homo sapiens
tgtgattgggagccc

SEQ ID NO: 2126471 - DNA, 15 bp, Homo sapiens
gtgattgggagccca

SEQ ID NO: 2126472 - DNA, 15 bp, Homo sapiens
tgattgggagcccaa

SEQ ID NO: 2126473 - DNA, 15 bp, Homo sapiens
gattgggagcccaaa

SEQ ID NO: 2126474 - DNA, 15 bp, Homo sapiens
attgggagcccaaag

SEQ ID NO: 2126475 - DNA, 15 bp, Homo sapiens
ttgggagcccaaaga

SEQ ID NO: 2126476 - DNA, 15 bp, Homo sapiens
tgggagcccaaagaa

SEQ ID NO: 2126477 - DNA, 15 bp, Homo sapiens
gggagcccaaagaag

SEQ ID NO: 2126478 - DNA, 15 bp, Homo sapiens
ggagcccaaagaaga

SEQ ID NO: 2126479 - DNA, 15 bp, Homo sapiens
gagcccaaagaagag

SEQ ID NO: 2126480 - DNA, 15 bp, Homo sapiens
agcccaaagaagagg

SEQ ID NO: 2126481 - DNA, 15 bp, Homo sapiens
gcccaaagaagagga

SEQ ID NO: 2126482 - DNA, 15 bp, Homo sapiens
cccaaagaagaggat

SEQ ID NO: 2126483 - DNA, 15 bp, Homo sapiens
ccaaagaagaggatg

SEQ ID NO: 2126484 - DNA, 15 bp, Homo sapiens
caaagaagaggatgc

SEQ ID NO: 2126485 - DNA, 15 bp, Homo sapiens
aaagaagaggatgct

SEQ ID NO: 2126486 - DNA, 15 bp, Homo sapiens
aagaagaggatgcta

SEQ ID NO: 2126487 - DNA, 15 bp, Homo sapiens
agaagaggatgctaa

SEQ ID NO: 2126488 - DNA, 15 bp, Homo sapiens
gaagaggatgctaac

SEQ ID NO: 2126489 - DNA, 15 bp, Homo sapiens
aagaggatgctaaca

SEQ ID NO: 2126490 - DNA, 15 bp, Homo sapiens
agaggatgctaacac

SEQ ID NO: 2126491 - DNA, 15 bp, Homo sapiens
gaggatgctaacaca

SEQ ID NO: 2126492 - DNA, 15 bp, Homo sapiens
aggatgctaacacag

SEQ ID NO: 2126493 - DNA, 15 bp, Homo sapiens
ggatgctaacacagc

SEQ ID NO: 2126494 - DNA, 15 bp, Homo sapiens
gatgctaacacagct

SEQ ID NO: 2126495 - DNA, 15 bp, Homo sapiens
atgctaacacagcta

SEQ ID NO: 2126496 - DNA, 15 bp, Homo sapiens
tgctaacacagctat

SEQ ID NO: 2126497 - DNA, 15 bp, Homo sapiens
gctaacacagctatg

SEQ ID NO: 2126498 - DNA, 15 bp, Homo sapiens
ctaacacagctatgg

SEQ ID NO: 2126499 - DNA, 15 bp, Homo sapiens
taacacagctatggc

SEQ ID NO: 2126500 - DNA, 15 bp, Homo sapiens
aacacagctatggca

SEQ ID NO: 2126501 - DNA, 15 bp, Homo sapiens
acacagctatggcat

SEQ ID NO: 2126502 - DNA, 15 bp, Homo sapiens
cacagctatggcatg

SEQ ID NO: 2126503 - DNA, 15 bp, Homo sapiens
acagctatggcatgg

SEQ ID NO: 2126504 - DNA, 15 bp, Homo sapiens
cagctatggcatggc

SEQ ID NO: 2126505 - DNA, 15 bp, Homo sapiens
agctatggcatggcc

SEQ ID NO: 2126506 - DNA, 15 bp, Homo sapiens
gctatggcatggcca

SEQ ID NO: 2126507 - DNA, 15 bp, Homo sapiens
ctatggcatggccac

SEQ ID NO: 2126508 - DNA, 15 bp, Homo sapiens
tatggcatggccaca

SEQ ID NO: 2126509 - DNA, 15 bp, Homo sapiens
atggcatggccacag

SEQ ID NO: 2126510 - DNA, 15 bp, Homo sapiens
tggcatggccacaga

SEQ ID NO: 2126511 - DNA, 15 bp, Homo sapiens
ggcatggccacagaa

SEQ ID NO: 2126512 - DNA, 15 bp, Homo sapiens
gcatggccacagaaa

SEQ ID NO: 2126513 - DNA, 15 bp, Homo sapiens
catggccacagaaaa

SEQ ID NO: 2126514 - DNA, 15 bp, Homo sapiens
atggccacagaaaat

SEQ ID NO: 2126515 - DNA, 15 bp, Homo sapiens
tggccacagaaaata

SEQ ID NO: 2126516 - DNA, 15 bp, Homo sapiens
ggccacagaaaatat

SEQ ID NO: 2126517 - DNA, 15 bp, Homo sapiens
gccacagaaaatatg

SEQ ID NO: 2126518 - DNA, 15 bp, Homo sapiens
ccacagaaaatatgc

SEQ ID NO: 2126519 - DNA, 15 bp, Homo sapiens
cacagaaaatatgcc

SEQ ID NO: 2126520 - DNA, 15 bp, Homo sapiens
acagaaaatatgcct

SEQ ID NO: 2126521 - DNA, 15 bp, Homo sapiens
cagaaaatatgcctg

SEQ ID NO: 2126522 - DNA, 15 bp, Homo sapiens
agaaaatatgcctga

SEQ ID NO: 2126523 - DNA, 15 bp, Homo sapiens
gaaaatatgcctgaa

SEQ ID NO: 2126524 - DNA, 15 bp, Homo sapiens
aaaatatgcctgaaa

SEQ ID NO: 2126525 - DNA, 15 bp, Homo sapiens
aaatatgcctgaaat

SEQ ID NO: 2126526 - DNA, 15 bp, Homo sapiens
aatatgcctgaaata

SEQ ID NO: 2126527 - DNA, 15 bp, Homo sapiens
atatgcctgaaatat

SEQ ID NO: 2126528 - DNA, 15 bp, Homo sapiens
tatgcctgaaatatc

SEQ ID NO: 2126529 - DNA, 15 bp, Homo sapiens
atgcctgaaatatcc

SEQ ID NO: 2126530 - DNA, 15 bp, Homo sapiens
tgcctgaaatatccc

SEQ ID NO: 2126531 - DNA, 15 bp, Homo sapiens
gcctgaaatatcccc

SEQ ID NO: 2126532 - DNA, 15 bp, Homo sapiens
cctgaaatatcccca

SEQ ID NO: 2126533 - DNA, 15 bp, Homo sapiens
ctgaaatatccccat

SEQ ID NO: 2126534 - DNA, 15 bp, Homo sapiens
tgaaatatccccatc

SEQ ID NO: 2126535 - DNA, 15 bp, Homo sapiens
gaaatatccccatca

SEQ ID NO: 2126536 - DNA, 15 bp, Homo sapiens
aaatatccccatcag

SEQ ID NO: 2126537 - DNA, 15 bp, Homo sapiens
aatatccccatcaga

SEQ ID NO: 2126538 - DNA, 15 bp, Homo sapiens
atatccccatcagag

SEQ ID NO: 2126539 - DNA, 15 bp, Homo sapiens
tatccccatcagagc

SEQ ID NO: 2126540 - DNA, 15 bp, Homo sapiens
atccccatcagagcc

SEQ ID NO: 2126541 - DNA, 15 bp, Homo sapiens
tccccatcagagccc

SEQ ID NO: 2126542 - DNA, 15 bp, Homo sapiens
ccccatcagagccca

SEQ ID NO: 2126543 - DNA, 15 bp, Homo sapiens
cccatcagagcccaa

SEQ ID NO: 2126544 - DNA, 15 bp, Homo sapiens
ccatcagagcccaac

SEQ ID NO: 2126545 - DNA, 15 bp, Homo sapiens
catcagagcccaact

SEQ ID NO: 2126546 - DNA, 15 bp, Homo sapiens
atcagagcccaactc

SEQ ID NO: 2126547 - DNA, 15 bp, Homo sapiens
tcagagcccaactct

SEQ ID NO: 2126548 - DNA, 15 bp, Homo sapiens
cagagcccaactctt

SEQ ID NO: 2126549 - DNA, 15 bp, Homo sapiens
agagcccaactctta

SEQ ID NO: 2126550 - DNA, 15 bp, Homo sapiens
gagcccaactcttac

SEQ ID NO: 2126551 - DNA, 15 bp, Homo sapiens
agcccaactcttact

SEQ ID NO: 2126552 - DNA, 15 bp, Homo sapiens
gcccaactcttacta

SEQ ID NO: 2126553 - DNA, 15 bp, Homo sapiens
cccaactcttactag

SEQ ID NO: 2126554 - DNA, 15 bp, Homo sapiens
ccaactcttactagc

SEQ ID NO: 2126555 - DNA, 15 bp, Homo sapiens
caactcttactagct

SEQ ID NO: 2126556 - DNA, 15 bp, Homo sapiens
aactcttactagcta

SEQ ID NO: 2126557 - DNA, 15 bp, Homo sapiens
actcttactagctaa

SEQ ID NO: 2126558 - DNA, 15 bp, Homo sapiens
ctcttactagctaat

SEQ ID NO: 2126559 - DNA, 15 bp, Homo sapiens
tcttactagctaatt

SEQ ID NO: 2126560 - DNA, 15 bp, Homo sapiens
cttactagctaattg

SEQ ID NO: 2126561 - DNA, 15 bp, Homo sapiens
ttactagctaattga

SEQ ID NO: 2126562 - DNA, 15 bp, Homo sapiens
tactagctaattgac

SEQ ID NO: 2126563 - DNA, 15 bp, Homo sapiens
actagctaattgact

SEQ ID NO: 2126564 - DNA, 15 bp, Homo sapiens
ctagctaattgactt

SEQ ID NO: 2126565 - DNA, 15 bp, Homo sapiens
tagctaattgacttt

SEQ ID NO: 2126566 - DNA, 15 bp, Homo sapiens
agctaattgactttg

SEQ ID NO: 2126567 - DNA, 15 bp, Homo sapiens
gctaattgactttga

SEQ ID NO: 2126568 - DNA, 15 bp, Homo sapiens
ctaattgactttgag

SEQ ID NO: 2126569 - DNA, 15 bp, Homo sapiens
taattgactttgagc

SEQ ID NO: 2126570 - DNA, 15 bp, Homo sapiens
aattgactttgagca

SEQ ID NO: 2126571 - DNA, 15 bp, Homo sapiens
attgactttgagcaa

SEQ ID NO: 2126572 - DNA, 15 bp, Homo sapiens
ttgactttgagcaag

SEQ ID NO: 2126573 - DNA, 15 bp, Homo sapiens
tgactttgagcaagt

SEQ ID NO: 2126574 - DNA, 15 bp, Homo sapiens
gactttgagcaagtc

SEQ ID NO: 2126575 - DNA, 15 bp, Homo sapiens
actttgagcaagtca

SEQ ID NO: 2126576 - DNA, 15 bp, Homo sapiens
ctttgagcaagtcac

SEQ ID NO: 2126577 - DNA, 15 bp, Homo sapiens
tgtggatcagttttt

SEQ ID NO: 2126578 - DNA, 15 bp, Homo sapiens
gtggatcagtttttt

SEQ ID NO: 2126579 - DNA, 15 bp, Homo sapiens
tggatcagtttttta

SEQ ID NO: 2126580 - DNA, 15 bp, Homo sapiens
ggatcagttttttac

SEQ ID NO: 2126581 - DNA, 15 bp, Homo sapiens
gatcagttttttact

SEQ ID NO: 2126582 - DNA, 15 bp, Homo sapiens
atcagttttttactc

SEQ ID NO: 2126583 - DNA, 15 bp, Homo sapiens
tcagttttttactct

SEQ ID NO: 2126584 - DNA, 15 bp, Homo sapiens
cagttttttactctt

SEQ ID NO: 2126585 - DNA, 15 bp, Homo sapiens
agttttttactcttc

SEQ ID NO: 2126586 - DNA, 15 bp, Homo sapiens
gttttttactcttcc

SEQ ID NO: 2126587 - DNA, 15 bp, Homo sapiens
ttttttactcttcca

SEQ ID NO: 2126588 - DNA, 15 bp, Homo sapiens
tttttactcttccac

SEQ ID NO: 2126589 - DNA, 15 bp, Homo sapiens
ttttactcttccact

SEQ ID NO: 2126590 - DNA, 15 bp, Homo sapiens
tttactcttccactc

SEQ ID NO: 2126591 - DNA, 15 bp, Homo sapiens
ttactcttccactct

SEQ ID NO: 2126592 - DNA, 15 bp, Homo sapiens
tactcttccactctc

SEQ ID NO: 2126593 - DNA, 15 bp, Homo sapiens
actcttccactctct

SEQ ID NO: 2126594 - DNA, 15 bp, Homo sapiens
ctcttccactctctt

SEQ ID NO: 2126595 - DNA, 15 bp, Homo sapiens
tcttccactctcttt

SEQ ID NO: 2126596 - DNA, 15 bp, Homo sapiens
cttccactctctttt

SEQ ID NO: 2126597 - DNA, 15 bp, Homo sapiens
ttccactctcttttc

SEQ ID NO: 2126598 - DNA, 15 bp, Homo sapiens
tccactctcttttct

SEQ ID NO: 2126599 - DNA, 15 bp, Homo sapiens
ccactctcttttcta

SEQ ID NO: 2126600 - DNA, 15 bp, Homo sapiens
cactctcttttctat

SEQ ID NO: 2126601 - DNA, 15 bp, Homo sapiens
actctcttttctata

SEQ ID NO: 2126602 - DNA, 15 bp, Homo sapiens
ctctcttttctatat

SEQ ID NO: 2126603 - DNA, 15 bp, Homo sapiens
tctcttttctatatt

SEQ ID NO: 2126604 - DNA, 15 bp, Homo sapiens
ctcttttctatattt

SEQ ID NO: 2126605 - DNA, 15 bp, Homo sapiens
cttttctatattttg

SEQ ID NO: 2126606 - DNA, 15 bp, Homo sapiens
ttttctatattttgc

SEQ ID NO: 2126607 - DNA, 15 bp, Homo sapiens
tttctatattttgcc

SEQ ID NO: 2126608 - DNA, 15 bp, Homo sapiens
ttctatattttgccc

SEQ ID NO: 2126609 - DNA, 15 bp, Homo sapiens
tctatattttgccca

SEQ ID NO: 2126610 - DNA, 15 bp, Homo sapiens
ctatattttgcccat

SEQ ID NO: 2126611 - DNA, 15 bp, Homo sapiens
tatattttgcccatc

SEQ ID NO: 2126612 - DNA, 15 bp, Homo sapiens
atattttgcccatcg

SEQ ID NO: 2126613 - DNA, 15 bp, Homo sapiens
tattttgcccatcgg

SEQ ID NO: 2126614 - DNA, 15 bp, Homo sapiens
attttgcccatcggg

SEQ ID NO: 2126615 - DNA, 15 bp, Homo sapiens
ttttgcccatcgggg

SEQ ID NO: 2126616 - DNA, 15 bp, Homo sapiens
tttgcccatcggggc

SEQ ID NO: 2126617 - DNA, 15 bp, Homo sapiens
ttgcccatcggggct

SEQ ID NO: 2126618 - DNA, 15 bp, Homo sapiens
tgcccatcggggctg

SEQ ID NO: 2126619 - DNA, 15 bp, Homo sapiens
gcccatcggggctgc

SEQ ID NO: 2126620 - DNA, 15 bp, Homo sapiens
cccatcggggctgcg

SEQ ID NO: 2126621 - DNA, 15 bp, Homo sapiens
ccatcggggctgcgg

SEQ ID NO: 2126622 - DNA, 15 bp, Homo sapiens
catcggggctgcgga

SEQ ID NO: 2126623 - DNA, 15 bp, Homo sapiens
atcggggctgcggat

SEQ ID NO: 2126624 - DNA, 15 bp, Homo sapiens
tcggggctgcggata

SEQ ID NO: 2126625 - DNA, 15 bp, Homo sapiens
cggggctgcggatac

SEQ ID NO: 2126626 - DNA, 15 bp, Homo sapiens
ggggctgcggatacc

SEQ ID NO: 2126627 - DNA, 15 bp, Homo sapiens
gggctgcggatacct

SEQ ID NO: 2126628 - DNA, 15 bp, Homo sapiens
ggctgcggatacctg

SEQ ID NO: 2126629 - DNA, 15 bp, Homo sapiens
gctgcggatacctgg

SEQ ID NO: 2126630 - DNA, 15 bp, Homo sapiens
ctgcggatacctggt

SEQ ID NO: 2126631 - DNA, 15 bp, Homo sapiens
tgcggatacctggtt

SEQ ID NO: 2126632 - DNA, 15 bp, Homo sapiens
gcggatacctggttt

SEQ ID NO: 2126633 - DNA, 15 bp, Homo sapiens
cggatacctggtttt

SEQ ID NO: 2126634 - DNA, 15 bp, Homo sapiens
ggatacctggtttta

SEQ ID NO: 2126635 - DNA, 15 bp, Homo sapiens
gatacctggttttat

SEQ ID NO: 2126636 - DNA, 15 bp, Homo sapiens
atacctggttttatt

SEQ ID NO: 2126637 - DNA, 15 bp, Homo sapiens
tacctggttttatta

SEQ ID NO: 2126638 - DNA, 15 bp, Homo sapiens
acctggttttattat

SEQ ID NO: 2126639 - DNA, 15 bp, Homo sapiens
cctggttttattatt

SEQ ID NO: 2126640 - DNA, 15 bp, Homo sapiens
ctggttttattattt

SEQ ID NO: 2126641 - DNA, 15 bp, Homo sapiens
tggttttattatttt

SEQ ID NO: 2126642 - DNA, 15 bp, Homo sapiens
ggttttattattttt

SEQ ID NO: 2126643 - DNA, 15 bp, Homo sapiens
gttttattatttttt

SEQ ID NO: 2126644 - DNA, 15 bp, Homo sapiens
ttttattattttttc

SEQ ID NO: 2126645 - DNA, 15 bp, Homo sapiens
tttattattttttct

SEQ ID NO: 2126646 - DNA, 15 bp, Homo sapiens
ttattattttttctt

SEQ ID NO: 2126647 - DNA, 15 bp, Homo sapiens
tattattttttcttt

SEQ ID NO: 2126648 - DNA, 15 bp, Homo sapiens
attattttttctttg

SEQ ID NO: 2126649 - DNA, 15 bp, Homo sapiens
tttaatttttgtttt

SEQ ID NO: 2126650 - DNA, 15 bp, Homo sapiens
ttaatttttgttttt

SEQ ID NO: 2126651 - DNA, 15 bp, Homo sapiens
taatttttgtttttc

SEQ ID NO: 2126652 - DNA, 15 bp, Homo sapiens
aatttttgtttttct

SEQ ID NO: 2126653 - DNA, 15 bp, Homo sapiens
atttttgtttttctg

SEQ ID NO: 2126654 - DNA, 15 bp, Homo sapiens
tttttgtttttctgg

SEQ ID NO: 2126655 - DNA, 15 bp, Homo sapiens
ttttgtttttctggc

SEQ ID NO: 2126656 - DNA, 15 bp, Homo sapiens
tttgtttttctggcc

SEQ ID NO: 2126657 - DNA, 15 bp, Homo sapiens
ttgtttttctggccc

SEQ ID NO: 2126658 - DNA, 15 bp, Homo sapiens
tgtttttctggccca

SEQ ID NO: 2126659 - DNA, 15 bp, Homo sapiens
gtttttctggcccat

SEQ ID NO: 2126660 - DNA, 15 bp, Homo sapiens
tttttctggcccatc

SEQ ID NO: 2126661 - DNA, 15 bp, Homo sapiens
ttttctggcccatcg

SEQ ID NO: 2126662 - DNA, 15 bp, Homo sapiens
tttctggcccatcgg

SEQ ID NO: 2126663 - DNA, 15 bp, Homo sapiens
ttctggcccatcggg

SEQ ID NO: 2126664 - DNA, 15 bp, Homo sapiens
ctggcccatcggggc

SEQ ID NO: 2126665 - DNA, 15 bp, Homo sapiens
tggcccatcggggcc

SEQ ID NO: 2126666 - DNA, 15 bp, Homo sapiens
ggcccatcggggccg

SEQ ID NO: 2126667 - DNA, 15 bp, Homo sapiens
cggatacctgctttg

SEQ ID NO: 2126668 - DNA, 15 bp, Homo sapiens
ggatacctgctttga

SEQ ID NO: 2126669 - DNA, 15 bp, Homo sapiens
gatacctgctttgat

SEQ ID NO: 2126670 - DNA, 15 bp, Homo sapiens
atacctgctttgatt

SEQ ID NO: 2126671 - DNA, 15 bp, Homo sapiens
tacctgctttgattt

SEQ ID NO: 2126672 - DNA, 15 bp, Homo sapiens
acctgctttgatttt

SEQ ID NO: 2126673 - DNA, 15 bp, Homo sapiens
cctgctttgattttt

SEQ ID NO: 2126674 - DNA, 15 bp, Homo sapiens
ctgctttgatttttt

SEQ ID NO: 2126675 - DNA, 15 bp, Homo sapiens
tgctttgattttttt

SEQ ID NO: 2126676 - DNA, 15 bp, Homo sapiens
gctttgatttttttt

SEQ ID NO: 2126677 - DNA, 15 bp, Homo sapiens
ctttgattttttttt

SEQ ID NO: 2126678 - DNA, 15 bp, Homo sapiens
tttgatttttttttt

SEQ ID NO: 2126679 - DNA, 15 bp, Homo sapiens
tgatttttttttttc

SEQ ID NO: 2126680 - DNA, 15 bp, Homo sapiens
gatttttttttttca

SEQ ID NO: 2126681 - DNA, 15 bp, Homo sapiens
atttttttttttcat

SEQ ID NO: 2126682 - DNA, 15 bp, Homo sapiens
tttttttttttcatc

SEQ ID NO: 2126683 - DNA, 15 bp, Homo sapiens
ttttttttttcatcg

SEQ ID NO: 2126684 - DNA, 15 bp, Homo sapiens
tttttttttcatcgc

SEQ ID NO: 2126685 - DNA, 15 bp, Homo sapiens
ttttttttcatcgcc

SEQ ID NO: 2126686 - DNA, 15 bp, Homo sapiens
tttttttcatcgccc

SEQ ID NO: 2126687 - DNA, 15 bp, Homo sapiens
ttttttcatcgccca

SEQ ID NO: 2126688 - DNA, 15 bp, Homo sapiens
tttttcatcgcccat

SEQ ID NO: 2126689 - DNA, 15 bp, Homo sapiens
ttttcatcgcccatc

SEQ ID NO: 2126690 - DNA, 15 bp, Homo sapiens
tttcatcgcccatcg

SEQ ID NO: 2126691 - DNA, 15 bp, Homo sapiens
ttcatcgcccatcgg

SEQ ID NO: 2126692 - DNA, 15 bp, Homo sapiens
tcatcgcccatcggt

SEQ ID NO: 2126693 - DNA, 15 bp, Homo sapiens
catcgcccatcggtg

SEQ ID NO: 2126694 - DNA, 15 bp, Homo sapiens
atcgcccatcggtgc

SEQ ID NO: 2126695 - DNA, 15 bp, Homo sapiens
tcgcccatcggtgct

SEQ ID NO: 2126696 - DNA, 15 bp, Homo sapiens
cgcccatcggtgctt

SEQ ID NO: 2126697 - DNA, 15 bp, Homo sapiens
gcccatcggtgcttt

SEQ ID NO: 2126698 - DNA, 15 bp, Homo sapiens
cccatcggtgctttt

SEQ ID NO: 2126699 - DNA, 15 bp, Homo sapiens
ccatcggtgcttttt

SEQ ID NO: 2126700 - DNA, 15 bp, Homo sapiens
catcggtgcttttta

SEQ ID NO: 2126701 - DNA, 15 bp, Homo sapiens
atcggtgctttttat

SEQ ID NO: 2126702 - DNA, 15 bp, Homo sapiens
tcggtgctttttatg

SEQ ID NO: 2126703 - DNA, 15 bp, Homo sapiens
cggtgctttttatgg

SEQ ID NO: 2126704 - DNA, 15 bp, Homo sapiens
ggtgctttttatgga

SEQ ID NO: 2126705 - DNA, 15 bp, Homo sapiens
gtgctttttatggat

SEQ ID NO: 2126706 - DNA, 15 bp, Homo sapiens
tgctttttatggatg

SEQ ID NO: 2126707 - DNA, 15 bp, Homo sapiens
gctttttatggatga

SEQ ID NO: 2126708 - DNA, 15 bp, Homo sapiens
ctttttatggatgaa

SEQ ID NO: 2126709 - DNA, 15 bp, Homo sapiens
tttttatggatgaaa

SEQ ID NO: 2126710 - DNA, 15 bp, Homo sapiens
ttttatggatgaaaa

SEQ ID NO: 2126711 - DNA, 15 bp, Homo sapiens
tttatggatgaaaaa

SEQ ID NO: 2126712 - DNA, 15 bp, Homo sapiens
ttatggatgaaaaaa

SEQ ID NO: 2126713 - DNA, 15 bp, Homo sapiens
tatggatgaaaaaat

SEQ ID NO: 2126714 - DNA, 15 bp, Homo sapiens
atggatgaaaaaatg

SEQ ID NO: 2126715 - DNA, 15 bp, Homo sapiens
tggatgaaaaaatgt

SEQ ID NO: 2126716 - DNA, 15 bp, Homo sapiens
ggatgaaaaaatgtt

SEQ ID NO: 2126717 - DNA, 15 bp, Homo sapiens
gatgaaaaaatgttg

SEQ ID NO: 2126718 - DNA, 15 bp, Homo sapiens
atgaaaaaatgttgg

SEQ ID NO: 2126719 - DNA, 15 bp, Homo sapiens
tgaaaaaatgttggt

SEQ ID NO: 2126720 - DNA, 15 bp, Homo sapiens
gaaaaaatgttggtt

SEQ ID NO: 2126721 - DNA, 15 bp, Homo sapiens
aaaaaatgttggttt

SEQ ID NO: 2126722 - DNA, 15 bp, Homo sapiens
aaaaatgttggtttt

SEQ ID NO: 2126723 - DNA, 15 bp, Homo sapiens
aaaatgttggttttg

SEQ ID NO: 2126724 - DNA, 15 bp, Homo sapiens
aaatgttggttttgt

SEQ ID NO: 2126725 - DNA, 15 bp, Homo sapiens
aatgttggttttgtg

SEQ ID NO: 2126726 - DNA, 15 bp, Homo sapiens
atgttggttttgtgg

SEQ ID NO: 2126727 - DNA, 15 bp, Homo sapiens
tgttggttttgtggg

SEQ ID NO: 2126728 - DNA, 15 bp, Homo sapiens
gttggttttgtgggt

SEQ ID NO: 2126729 - DNA, 15 bp, Homo sapiens
ttggttttgtgggtt

SEQ ID NO: 2126730 - DNA, 15 bp, Homo sapiens
tggttttgtgggttg

SEQ ID NO: 2126731 - DNA, 15 bp, Homo sapiens
ggttttgtgggttgt

SEQ ID NO: 2126732 - DNA, 15 bp, Homo sapiens
gttttgtgggttgtt

SEQ ID NO: 2126733 - DNA, 15 bp, Homo sapiens
ttttgtgggttgttg

SEQ ID NO: 2126734 - DNA, 15 bp, Homo sapiens
tttgtgggttgttgc

SEQ ID NO: 2126735 - DNA, 15 bp, Homo sapiens
ttgtgggttgttgca

SEQ ID NO: 2126736 - DNA, 15 bp, Homo sapiens
tgtgggttgttgcac

SEQ ID NO: 2126737 - DNA, 15 bp, Homo sapiens
gtgggttgttgcact

SEQ ID NO: 2126738 - DNA, 15 bp, Homo sapiens
tgggttgttgcactc

SEQ ID NO: 2126739 - DNA, 15 bp, Homo sapiens
gggttgttgcactct

SEQ ID NO: 2126740 - DNA, 15 bp, Homo sapiens
ggttgttgcactctc

SEQ ID NO: 2126741 - DNA, 15 bp, Homo sapiens
gttgttgcactctct

SEQ ID NO: 2126742 - DNA, 15 bp, Homo sapiens
ttgttgcactctctg

SEQ ID NO: 2126743 - DNA, 15 bp, Homo sapiens
tgttgcactctctgg

SEQ ID NO: 2126744 - DNA, 15 bp, Homo sapiens
gttgcactctctgga

SEQ ID NO: 2126745 - DNA, 15 bp, Homo sapiens
ttgcactctctggaa

SEQ ID NO: 2126746 - DNA, 15 bp, Homo sapiens
tgcactctctggaat

SEQ ID NO: 2126747 - DNA, 15 bp, Homo sapiens
gcactctctggaata

SEQ ID NO: 2126748 - DNA, 15 bp, Homo sapiens
cactctctggaatat

SEQ ID NO: 2126749 - DNA, 15 bp, Homo sapiens
actctctggaatatc

SEQ ID NO: 2126750 - DNA, 15 bp, Homo sapiens
ctctctggaatatct

SEQ ID NO: 2126751 - DNA, 15 bp, Homo sapiens
tctctggaatatcta

SEQ ID NO: 2126752 - DNA, 15 bp, Homo sapiens
ctctggaatatctac

SEQ ID NO: 2126753 - DNA, 15 bp, Homo sapiens
tctggaatatctaca

SEQ ID NO: 2126754 - DNA, 15 bp, Homo sapiens
ctggaatatctacac

SEQ ID NO: 2126755 - DNA, 15 bp, Homo sapiens
tggaatatctacact

SEQ ID NO: 2126756 - DNA, 15 bp, Homo sapiens
ggaatatctacactt

SEQ ID NO: 2126757 - DNA, 15 bp, Homo sapiens
gaatatctacacttt

SEQ ID NO: 2126758 - DNA, 15 bp, Homo sapiens
aatatctacactttt

SEQ ID NO: 2126759 - DNA, 15 bp, Homo sapiens
atatctacacttttt

SEQ ID NO: 2126760 - DNA, 15 bp, Homo sapiens
tatctacactttttt

SEQ ID NO: 2126761 - DNA, 15 bp, Homo sapiens
atctacacttttttt

SEQ ID NO: 2126762 - DNA, 15 bp, Homo sapiens
tctacactttttttt

SEQ ID NO: 2126763 - DNA, 15 bp, Homo sapiens
ctacacttttttttg

SEQ ID NO: 2126764 - DNA, 15 bp, Homo sapiens
tacacttttttttgc

SEQ ID NO: 2126765 - DNA, 15 bp, Homo sapiens
acacttttttttgct

SEQ ID NO: 2126766 - DNA, 15 bp, Homo sapiens
cacttttttttgctg

SEQ ID NO: 2126767 - DNA, 15 bp, Homo sapiens
acttttttttgctgc

SEQ ID NO: 2126768 - DNA, 15 bp, Homo sapiens
cttttttttgctgct

SEQ ID NO: 2126769 - DNA, 15 bp, Homo sapiens
ttttttttgctgctg

SEQ ID NO: 2126770 - DNA, 15 bp, Homo sapiens
tttttttgctgctga

SEQ ID NO: 2126771 - DNA, 15 bp, Homo sapiens
ttttttgctgctgat

SEQ ID NO: 2126772 - DNA, 15 bp, Homo sapiens
tttttgctgctgatc

SEQ ID NO: 2126773 - DNA, 15 bp, Homo sapiens
ttttgctgctgatca

SEQ ID NO: 2126774 - DNA, 15 bp, Homo sapiens
tttgctgctgatcat

SEQ ID NO: 2126775 - DNA, 15 bp, Homo sapiens
ttgctgctgatcatt

SEQ ID NO: 2126776 - DNA, 15 bp, Homo sapiens
tgctgctgatcattt

SEQ ID NO: 2126777 - DNA, 15 bp, Homo sapiens
gctgctgatcatttg

SEQ ID NO: 2126778 - DNA, 15 bp, Homo sapiens
ctgctgatcatttgg

SEQ ID NO: 2126779 - DNA, 15 bp, Homo sapiens
tgctgatcatttggt

SEQ ID NO: 2126780 - DNA, 15 bp, Homo sapiens
gctgatcatttggtg

SEQ ID NO: 2126781 - DNA, 15 bp, Homo sapiens
ctgatcatttggtgg

SEQ ID NO: 2126782 - DNA, 15 bp, Homo sapiens
tgatcatttggtggt

SEQ ID NO: 2126783 - DNA, 15 bp, Homo sapiens
gatcatttggtggtg

SEQ ID NO: 2126784 - DNA, 15 bp, Homo sapiens
atcatttggtggtgt

SEQ ID NO: 2126785 - DNA, 15 bp, Homo sapiens
tcatttggtggtgtg

SEQ ID NO: 2126786 - DNA, 15 bp, Homo sapiens
catttggtggtgtgt

SEQ ID NO: 2126787 - DNA, 15 bp, Homo sapiens
atttggtggtgtgtg

SEQ ID NO: 2126788 - DNA, 15 bp, Homo sapiens
tttggtggtgtgtga

SEQ ID NO: 2126789 - DNA, 15 bp, Homo sapiens
ttggtggtgtgtgag

SEQ ID NO: 2126790 - DNA, 15 bp, Homo sapiens
tggtggtgtgtgagt

SEQ ID NO: 2126791 - DNA, 15 bp, Homo sapiens
ggtggtgtgtgagtg

SEQ ID NO: 2126792 - DNA, 15 bp, Homo sapiens
gtggtgtgtgagtgt

SEQ ID NO: 2126793 - DNA, 15 bp, Homo sapiens
tggtgtgtgagtgta

SEQ ID NO: 2126794 - DNA, 15 bp, Homo sapiens
ggtgtgtgagtgtac

SEQ ID NO: 2126795 - DNA, 15 bp, Homo sapiens
gtgtgtgagtgtacc

SEQ ID NO: 2126796 - DNA, 15 bp, Homo sapiens
tgtgtgagtgtacct

SEQ ID NO: 2126797 - DNA, 15 bp, Homo sapiens
gtgtgagtgtaccta

SEQ ID NO: 2126798 - DNA, 15 bp, Homo sapiens
tgtgagtgtacctac

SEQ ID NO: 2126799 - DNA, 15 bp, Homo sapiens
gtgagtgtacctacc

SEQ ID NO: 2126800 - DNA, 15 bp, Homo sapiens
tgagtgtacctaccg

SEQ ID NO: 2126801 - DNA, 15 bp, Homo sapiens
gagtgtacctaccgc

SEQ ID NO: 2126802 - DNA, 15 bp, Homo sapiens
agtgtacctaccgct

SEQ ID NO: 2126803 - DNA, 15 bp, Homo sapiens
gtgtacctaccgctt

SEQ ID NO: 2126804 - DNA, 15 bp, Homo sapiens
tgtacctaccgcttt

SEQ ID NO: 2126805 - DNA, 15 bp, Homo sapiens
gtacctaccgctttg

SEQ ID NO: 2126806 - DNA, 15 bp, Homo sapiens
tacctaccgctttgg

SEQ ID NO: 2126807 - DNA, 15 bp, Homo sapiens
acctaccgctttggc

SEQ ID NO: 2126808 - DNA, 15 bp, Homo sapiens
cctaccgctttggca

SEQ ID NO: 2126809 - DNA, 15 bp, Homo sapiens
ctaccgctttggcag

SEQ ID NO: 2126810 - DNA, 15 bp, Homo sapiens
taccgctttggcaga

SEQ ID NO: 2126811 - DNA, 15 bp, Homo sapiens
accgctttggcagag

SEQ ID NO: 2126812 - DNA, 15 bp, Homo sapiens
ccgctttggcagaga

SEQ ID NO: 2126813 - DNA, 15 bp, Homo sapiens
cgctttggcagagaa

SEQ ID NO: 2126814 - DNA, 15 bp, Homo sapiens
gctttggcagagaat

SEQ ID NO: 2126815 - DNA, 15 bp, Homo sapiens
ctttggcagagaatg

SEQ ID NO: 2126816 - DNA, 15 bp, Homo sapiens
tttggcagagaatga

SEQ ID NO: 2126817 - DNA, 15 bp, Homo sapiens
ttggcagagaatgac

SEQ ID NO: 2126818 - DNA, 15 bp, Homo sapiens
tggcagagaatgact

SEQ ID NO: 2126819 - DNA, 15 bp, Homo sapiens
ggcagagaatgactc

SEQ ID NO: 2126820 - DNA, 15 bp, Homo sapiens
gcagagaatgactct

SEQ ID NO: 2126821 - DNA, 15 bp, Homo sapiens
cagagaatgactctg

SEQ ID NO: 2126822 - DNA, 15 bp, Homo sapiens
agagaatgactctgc

SEQ ID NO: 2126823 - DNA, 15 bp, Homo sapiens
gagaatgactctgca

SEQ ID NO: 2126824 - DNA, 15 bp, Homo sapiens
agaatgactctgcag

SEQ ID NO: 2126825 - DNA, 15 bp, Homo sapiens
gaatgactctgcagt

SEQ ID NO: 2126826 - DNA, 15 bp, Homo sapiens
aatgactctgcagtt

SEQ ID NO: 2126827 - DNA, 15 bp, Homo sapiens
atgactctgcagtta

SEQ ID NO: 2126828 - DNA, 15 bp, Homo sapiens
tgactctgcagttaa

SEQ ID NO: 2126829 - DNA, 15 bp, Homo sapiens
gactctgcagttaag

SEQ ID NO: 2126830 - DNA, 15 bp, Homo sapiens
actctgcagttaagc

SEQ ID NO: 2126831 - DNA, 15 bp, Homo sapiens
ctctgcagttaagct

SEQ ID NO: 2126832 - DNA, 15 bp, Homo sapiens
tctgcagttaagcta

SEQ ID NO: 2126833 - DNA, 15 bp, Homo sapiens
ctgcagttaagctaa

SEQ ID NO: 2126834 - DNA, 15 bp, Homo sapiens
tgcagttaagctaag

SEQ ID NO: 2126835 - DNA, 15 bp, Homo sapiens
gcagttaagctaagg

SEQ ID NO: 2126836 - DNA, 15 bp, Homo sapiens
cagttaagctaaggg

SEQ ID NO: 2126837 - DNA, 15 bp, Homo sapiens
agttaagctaagggc

SEQ ID NO: 2126838 - DNA, 15 bp, Homo sapiens
gttaagctaagggcg

SEQ ID NO: 2126839 - DNA, 15 bp, Homo sapiens
ttaagctaagggcgt

SEQ ID NO: 2126840 - DNA, 15 bp, Homo sapiens
taagctaagggcgtg

SEQ ID NO: 2126841 - DNA, 15 bp, Homo sapiens
aagctaagggcgtgt

SEQ ID NO: 2126842 - DNA, 15 bp, Homo sapiens
agctaagggcgtgtt

SEQ ID NO: 2126843 - DNA, 15 bp, Homo sapiens
aatcatcttttatca

SEQ ID NO: 2126844 - DNA, 15 bp, Homo sapiens
atcatcttttatcag

SEQ ID NO: 2126845 - DNA, 15 bp, Homo sapiens
tcatcttttatcagt

SEQ ID NO: 2126846 - DNA, 15 bp, Homo sapiens
catcttttatcagta

SEQ ID NO: 2126847 - DNA, 15 bp, Homo sapiens
atcttttatcagtac

SEQ ID NO: 2126848 - DNA, 15 bp, Homo sapiens
tcttttatcagtaca

SEQ ID NO: 2126849 - DNA, 15 bp, Homo sapiens
cttttatcagtacaa

SEQ ID NO: 2126850 - DNA, 15 bp, Homo sapiens
ttttatcagtacaag

SEQ ID NO: 2126851 - DNA, 15 bp, Homo sapiens
tttatcagtacaagg

SEQ ID NO: 2126852 - DNA, 15 bp, Homo sapiens
ttatcagtacaaggg

SEQ ID NO: 2126853 - DNA, 15 bp, Homo sapiens
tatcagtacaaggga

SEQ ID NO: 2126854 - DNA, 15 bp, Homo sapiens
atcagtacaagggac

SEQ ID NO: 2126855 - DNA, 15 bp, Homo sapiens
tcagtacaagggact

SEQ ID NO: 2126856 - DNA, 15 bp, Homo sapiens
cagtacaagggacta

SEQ ID NO: 2126857 - DNA, 15 bp, Homo sapiens
agtacaagggactag

SEQ ID NO: 2126858 - DNA, 15 bp, Homo sapiens
gtacaagggactagt

SEQ ID NO: 2126859 - DNA, 15 bp, Homo sapiens
tacaagggactagtt

SEQ ID NO: 2126860 - DNA, 15 bp, Homo sapiens
acaagggactagtta

SEQ ID NO: 2126861 - DNA, 15 bp, Homo sapiens
caagggactagttaa

SEQ ID NO: 2126862 - DNA, 15 bp, Homo sapiens
aagggactagttaaa

SEQ ID NO: 2126863 - DNA, 15 bp, Homo sapiens
agggactagttaaaa

SEQ ID NO: 2126864 - DNA, 15 bp, Homo sapiens
gggactagttaaaaa

SEQ ID NO: 2126865 - DNA, 15 bp, Homo sapiens
ggactagttaaaaat

SEQ ID NO: 2126866 - DNA, 15 bp, Homo sapiens
gactagttaaaaatg

SEQ ID NO: 2126867 - DNA, 15 bp, Homo sapiens
actagttaaaaatgg

SEQ ID NO: 2126868 - DNA, 15 bp, Homo sapiens
ctagttaaaaatgga

SEQ ID NO: 2126869 - DNA, 15 bp, Homo sapiens
tagttaaaaatggaa

SEQ ID NO: 2126870 - DNA, 15 bp, Homo sapiens
agttaaaaatggaag

SEQ ID NO: 2126871 - DNA, 15 bp, Homo sapiens
gttaaaaatggaagg

SEQ ID NO: 2126872 - DNA, 15 bp, Homo sapiens
ttaaaaatggaaggt

SEQ ID NO: 2126873 - DNA, 15 bp, Homo sapiens
taaaaatggaaggtt

SEQ ID NO: 2126874 - DNA, 15 bp, Homo sapiens
aaaaatggaaggtta

SEQ ID NO: 2126875 - DNA, 15 bp, Homo sapiens
aaaatggaaggttag

SEQ ID NO: 2126876 - DNA, 15 bp, Homo sapiens
aaatggaaggttagg

SEQ ID NO: 2126877 - DNA, 15 bp, Homo sapiens
aatggaaggttagga

SEQ ID NO: 2126878 - DNA, 15 bp, Homo sapiens
atggaaggttaggaa

SEQ ID NO: 2126879 - DNA, 15 bp, Homo sapiens
tggaaggttaggaaa

SEQ ID NO: 2126880 - DNA, 15 bp, Homo sapiens
ggaaggttaggaaag

SEQ ID NO: 2126881 - DNA, 15 bp, Homo sapiens
gaaggttaggaaaga

SEQ ID NO: 2126882 - DNA, 15 bp, Homo sapiens
aaggttaggaaagac

SEQ ID NO: 2126883 - DNA, 15 bp, Homo sapiens
aggttaggaaagact

SEQ ID NO: 2126884 - DNA, 15 bp, Homo sapiens
ggttaggaaagacta

SEQ ID NO: 2126885 - DNA, 15 bp, Homo sapiens
gttaggaaagactaa

SEQ ID NO: 2126886 - DNA, 15 bp, Homo sapiens
ttaggaaagactaag

SEQ ID NO: 2126887 - DNA, 15 bp, Homo sapiens
taggaaagactaagg

SEQ ID NO: 2126888 - DNA, 15 bp, Homo sapiens
aggaaagactaaggt

SEQ ID NO: 2126889 - DNA, 15 bp, Homo sapiens
ggaaagactaaggtg

SEQ ID NO: 2126890 - DNA, 15 bp, Homo sapiens
gaaagactaaggtgc

SEQ ID NO: 2126891 - DNA, 15 bp, Homo sapiens
aaagactaaggtgca

SEQ ID NO: 2126892 - DNA, 15 bp, Homo sapiens
aagactaaggtgcag

SEQ ID NO: 2126893 - DNA, 15 bp, Homo sapiens
agactaaggtgcagg

SEQ ID NO: 2126894 - DNA, 15 bp, Homo sapiens
gactaaggtgcaggg

SEQ ID NO: 2126895 - DNA, 15 bp, Homo sapiens
actaaggtgcagggc

SEQ ID NO: 2126896 - DNA, 15 bp, Homo sapiens
ctaaggtgcagggct

SEQ ID NO: 2126897 - DNA, 15 bp, Homo sapiens
taaggtgcagggctt

SEQ ID NO: 2126898 - DNA, 15 bp, Homo sapiens
aaggtgcagggctta

SEQ ID NO: 2126899 - DNA, 15 bp, Homo sapiens
aggtgcagggcttaa

SEQ ID NO: 2126900 - DNA, 15 bp, Homo sapiens
ggtgcagggcttaaa

SEQ ID NO: 2126901 - DNA, 15 bp, Homo sapiens
gtgcagggcttaaaa

SEQ ID NO: 2126902 - DNA, 15 bp, Homo sapiens
tgcagggcttaaaat

SEQ ID NO: 2126903 - DNA, 15 bp, Homo sapiens
tggtggacatgtgcg

SEQ ID NO: 2126904 - DNA, 15 bp, Homo sapiens
ggtggacatgtgcgg

SEQ ID NO: 2126905 - DNA, 15 bp, Homo sapiens
gtggacatgtgcggt

SEQ ID NO: 2126906 - DNA, 15 bp, Homo sapiens
tggacatgtgcggtc

SEQ ID NO: 2126907 - DNA, 15 bp, Homo sapiens
ggacatgtgcggtca

SEQ ID NO: 2126908 - DNA, 15 bp, Homo sapiens
gacatgtgcggtcac

SEQ ID NO: 2126909 - DNA, 15 bp, Homo sapiens
acatgtgcggtcaca

SEQ ID NO: 2126910 - DNA, 15 bp, Homo sapiens
catgtgcggtcacac

SEQ ID NO: 2126911 - DNA, 15 bp, Homo sapiens
atgtgcggtcacaca

SEQ ID NO: 2126912 - DNA, 15 bp, Homo sapiens
tgtgcggtcacacag

SEQ ID NO: 2126913 - DNA, 15 bp, Homo sapiens
gtgcggtcacacagg

SEQ ID NO: 2126914 - DNA, 15 bp, Homo sapiens
tgcggtcacacagga

SEQ ID NO: 2126915 - DNA, 15 bp, Homo sapiens
gcggtcacacaggaa

SEQ ID NO: 2126916 - DNA, 15 bp, Homo sapiens
cggtcacacaggaaa

SEQ ID NO: 2126917 - DNA, 15 bp, Homo sapiens
ggtcacacaggaaaa

SEQ ID NO: 2126918 - DNA, 15 bp, Homo sapiens
gtcacacaggaaaag

SEQ ID NO: 2126919 - DNA, 15 bp, Homo sapiens
tcacacaggaaaaga

SEQ ID NO: 2126920 - DNA, 15 bp, Homo sapiens
tggcgggcttgccgc

SEQ ID NO: 2126921 - DNA, 15 bp, Homo sapiens
ggcgggcttgccgca

SEQ ID NO: 2126922 - DNA, 15 bp, Homo sapiens
gcgggcttgccgcat

SEQ ID NO: 2126923 - DNA, 15 bp, Homo sapiens
cgggcttgccgcatt

SEQ ID NO: 2126924 - DNA, 15 bp, Homo sapiens
gggcttgccgcattg

SEQ ID NO: 2126925 - DNA, 15 bp, Homo sapiens
ggcttgccgcattgt

SEQ ID NO: 2126926 - DNA, 15 bp, Homo sapiens
gcttgccgcattgtt

SEQ ID NO: 2126927 - DNA, 15 bp, Homo sapiens
cttgccgcattgtta

SEQ ID NO: 2126928 - DNA, 15 bp, Homo sapiens
ttgccgcattgttaa

SEQ ID NO: 2126929 - DNA, 15 bp, Homo sapiens
tgccgcattgttaaa

SEQ ID NO: 2126930 - DNA, 15 bp, Homo sapiens
gccgcattgttaaag

SEQ ID NO: 2126931 - DNA, 15 bp, Homo sapiens
ccgcattgttaaaga

SEQ ID NO: 2126932 - DNA, 15 bp, Homo sapiens
cgcattgttaaagat

SEQ ID NO: 2126933 - DNA, 15 bp, Homo sapiens
gcattgttaaagatg

SEQ ID NO: 2126934 - DNA, 15 bp, Homo sapiens
cattgttaaagatgg

SEQ ID NO: 2126935 - DNA, 15 bp, Homo sapiens
attgttaaagatggc

SEQ ID NO: 2126936 - DNA, 15 bp, Homo sapiens
ttgttaaagatggcg

SEQ ID NO: 2126937 - DNA, 15 bp, Homo sapiens
tgttaaagatggcgg

SEQ ID NO: 2126938 - DNA, 15 bp, Homo sapiens
gttaaagatggcggg

SEQ ID NO: 2126939 - DNA, 15 bp, Homo sapiens
ttaaagatggcgggt

SEQ ID NO: 2126940 - DNA, 15 bp, Homo sapiens
taaagatggcgggtt

SEQ ID NO: 2126941 - DNA, 15 bp, Homo sapiens
aaagatggcgggttt

SEQ ID NO: 2126942 - DNA, 15 bp, Homo sapiens
aagatggcgggtttt

SEQ ID NO: 2126943 - DNA, 15 bp, Homo sapiens
agatggcgggttttg

SEQ ID NO: 2126944 - DNA, 15 bp, Homo sapiens
gatggcgggttttgc

SEQ ID NO: 2126945 - DNA, 15 bp, Homo sapiens
atggcgggttttgcc

SEQ ID NO: 2126946 - DNA, 15 bp, Homo sapiens
tggcgggttttgccg

SEQ ID NO: 2126947 - DNA, 15 bp, Homo sapiens
ggcgggttttgccgc

SEQ ID NO: 2126948 - DNA, 15 bp, Homo sapiens
gcgggttttgccgcc

SEQ ID NO: 2126949 - DNA, 15 bp, Homo sapiens
cgggttttgccgcct

SEQ ID NO: 2126950 - DNA, 15 bp, Homo sapiens
gggttttgccgccta

SEQ ID NO: 2126951 - DNA, 15 bp, Homo sapiens
ggttttgccgcctag

SEQ ID NO: 2126952 - DNA, 15 bp, Homo sapiens
gttttgccgcctagt

SEQ ID NO: 2126953 - DNA, 15 bp, Homo sapiens
ttttgccgcctagtg

SEQ ID NO: 2126954 - DNA, 15 bp, Homo sapiens
tttgccgcctagtgc

SEQ ID NO: 2126955 - DNA, 15 bp, Homo sapiens
ttgccgcctagtgcc

SEQ ID NO: 2126956 - DNA, 15 bp, Homo sapiens
tgccgcctagtgcca

SEQ ID NO: 2126957 - DNA, 15 bp, Homo sapiens
gccgcctagtgccac

SEQ ID NO: 2126958 - DNA, 15 bp, Homo sapiens
ccgcctagtgccacg

SEQ ID NO: 2126959 - DNA, 15 bp, Homo sapiens
cgcctagtgccacgc

SEQ ID NO: 2126960 - DNA, 15 bp, Homo sapiens
gcctagtgccacgca

SEQ ID NO: 2126961 - DNA, 15 bp, Homo sapiens
cctagtgccacgcag

SEQ ID NO: 2126962 - DNA, 15 bp, Homo sapiens
ctagtgccacgcaga

SEQ ID NO: 2126963 - DNA, 15 bp, Homo sapiens
tagtgccacgcagag

SEQ ID NO: 2126964 - DNA, 15 bp, Homo sapiens
agtgccacgcagagc

SEQ ID NO: 2126965 - DNA, 15 bp, Homo sapiens
gtgccacgcagagcg

SEQ ID NO: 2126966 - DNA, 15 bp, Homo sapiens
tgccacgcagagcgg

SEQ ID NO: 2126967 - DNA, 15 bp, Homo sapiens
gccacgcagagcggg

SEQ ID NO: 2126968 - DNA, 15 bp, Homo sapiens
ccacgcagagcggga

SEQ ID NO: 2126969 - DNA, 15 bp, Homo sapiens
cacgcagagcgggag

SEQ ID NO: 2126970 - DNA, 15 bp, Homo sapiens
acgcagagcgggaga

SEQ ID NO: 2126971 - DNA, 15 bp, Homo sapiens
cgcagagcgggagaa

SEQ ID NO: 2126972 - DNA, 15 bp, Homo sapiens
gcagagcgggagaaa

SEQ ID NO: 2126973 - DNA, 15 bp, Homo sapiens
cagagcgggagaaaa

SEQ ID NO: 2126974 - DNA, 15 bp, Homo sapiens
agagcgggagaaaag

SEQ ID NO: 2126975 - DNA, 15 bp, Homo sapiens
gagcgggagaaaagg

SEQ ID NO: 2126976 - DNA, 15 bp, Homo sapiens
agcgggagaaaaggt

SEQ ID NO: 2126977 - DNA, 15 bp, Homo sapiens
gcgggagaaaaggtg

SEQ ID NO: 2126978 - DNA, 15 bp, Homo sapiens
cgggagaaaaggtgg

SEQ ID NO: 2126979 - DNA, 15 bp, Homo sapiens
gggagaaaaggtggg

SEQ ID NO: 2126980 - DNA, 15 bp, Homo sapiens
ggagaaaaggtggga

SEQ ID NO: 2126981 - DNA, 15 bp, Homo sapiens
gagaaaaggtgggat

SEQ ID NO: 2126982 - DNA, 15 bp, Homo sapiens
agaaaaggtgggatg

SEQ ID NO: 2126983 - DNA, 15 bp, Homo sapiens
gaaaaggtgggatgg

SEQ ID NO: 2126984 - DNA, 15 bp, Homo sapiens
aaaaggtgggatgga

SEQ ID NO: 2126985 - DNA, 15 bp, Homo sapiens
aaaggtgggatggac

SEQ ID NO: 2126986 - DNA, 15 bp, Homo sapiens
aaggtgggatggaca

SEQ ID NO: 2126987 - DNA, 15 bp, Homo sapiens
aggtgggatggacag

SEQ ID NO: 2126988 - DNA, 15 bp, Homo sapiens
ggtgggatggacagt

SEQ ID NO: 2126989 - DNA, 15 bp, Homo sapiens
gtgggatggacagtg

SEQ ID NO: 2126990 - DNA, 15 bp, Homo sapiens
tgggatggacagtgc

SEQ ID NO: 2126991 - DNA, 15 bp, Homo sapiens
gggatggacagtgct

SEQ ID NO: 2126992 - DNA, 15 bp, Homo sapiens
ggatggacagtgctg

SEQ ID NO: 2126993 - DNA, 15 bp, Homo sapiens
gatggacagtgctgg

SEQ ID NO: 2126994 - DNA, 15 bp, Homo sapiens
atggacagtgctgga

SEQ ID NO: 2126995 - DNA, 15 bp, Homo sapiens
tggacagtgctggat

SEQ ID NO: 2126996 - DNA, 15 bp, Homo sapiens
ggacagtgctggatt

SEQ ID NO: 2126997 - DNA, 15 bp, Homo sapiens
gacagtgctggattg

SEQ ID NO: 2126998 - DNA, 15 bp, Homo sapiens
acagtgctggattgc

SEQ ID NO: 2126999 - DNA, 15 bp, Homo sapiens
cagtgctggattgct

SEQ ID NO: 2127000 - DNA, 15 bp, Homo sapiens
agtgctggattgctg

SEQ ID NO: 2127001 - DNA, 15 bp, Homo sapiens
gtgctggattgctgc

SEQ ID NO: 2127002 - DNA, 15 bp, Homo sapiens
tgctggattgctgca

SEQ ID NO: 2127003 - DNA, 15 bp, Homo sapiens
gctggattgctgcat

SEQ ID NO: 2127004 - DNA, 15 bp, Homo sapiens
ctacttatcagacag

SEQ ID NO: 2127005 - DNA, 15 bp, Homo sapiens
tacttatcagacagg

SEQ ID NO: 2127006 - DNA, 15 bp, Homo sapiens
acttatcagacagga

SEQ ID NO: 2127007 - DNA, 15 bp, Homo sapiens
cttatcagacaggaa

SEQ ID NO: 2127008 - DNA, 15 bp, Homo sapiens
ttatcagacaggaaa

SEQ ID NO: 2127009 - DNA, 15 bp, Homo sapiens
tatcagacaggaaac

SEQ ID NO: 2127010 - DNA, 15 bp, Homo sapiens
atcagacaggaaact

SEQ ID NO: 2127011 - DNA, 15 bp, Homo sapiens
tcagacaggaaactt

SEQ ID NO: 2127012 - DNA, 15 bp, Homo sapiens
cagacaggaaacttg

SEQ ID NO: 2127013 - DNA, 15 bp, Homo sapiens
agacaggaaacttga

SEQ ID NO: 2127014 - DNA, 15 bp, Homo sapiens
gacaggaaacttgaa

SEQ ID NO: 2127015 - DNA, 15 bp, Homo sapiens
acaggaaacttgaat

SEQ ID NO: 2127016 - DNA, 15 bp, Homo sapiens
caggaaacttgaatt

SEQ ID NO: 2127017 - DNA, 15 bp, Homo sapiens
aggaaacttgaattg

SEQ ID NO: 2127018 - DNA, 15 bp, Homo sapiens
ggaaacttgaattgc

SEQ ID NO: 2127019 - DNA, 15 bp, Homo sapiens
gaaacttgaattgct

SEQ ID NO: 2127020 - DNA, 15 bp, Homo sapiens
aaacttgaattgctg

SEQ ID NO: 2127021 - DNA, 15 bp, Homo sapiens
aacttgaattgctgt

SEQ ID NO: 2127022 - DNA, 15 bp, Homo sapiens
acttgaattgctgtg

SEQ ID NO: 2127023 - DNA, 15 bp, Homo sapiens
cttgaattgctgtgg

SEQ ID NO: 2127024 - DNA, 15 bp, Homo sapiens
ttgaattgctgtggt

SEQ ID NO: 2127025 - DNA, 15 bp, Homo sapiens
tgaattgctgtggtc

SEQ ID NO: 2127026 - DNA, 15 bp, Homo sapiens
gaattgctgtggtct

SEQ ID NO: 2127027 - DNA, 15 bp, Homo sapiens
aattgctgtggtctg

SEQ ID NO: 2127028 - DNA, 15 bp, Homo sapiens
attgctgtggtctgg

SEQ ID NO: 2127029 - DNA, 15 bp, Homo sapiens
ttgctgtggtctggt

SEQ ID NO: 2127030 - DNA, 15 bp, Homo sapiens
tgctgtggtctggtg

SEQ ID NO: 2127031 - DNA, 15 bp, Homo sapiens
gctgtggtctggtgt

SEQ ID NO: 2127032 - DNA, 15 bp, Homo sapiens
ctgtggtctggtgtc

SEQ ID NO: 2127033 - DNA, 15 bp, Homo sapiens
tgtggtctggtgtcc

SEQ ID NO: 2127034 - DNA, 15 bp, Homo sapiens
gtggtctggtgtcct

SEQ ID NO: 2127035 - DNA, 15 bp, Homo sapiens
tggtctggtgtcctc

SEQ ID NO: 2127036 - DNA, 15 bp, Homo sapiens
ggtctggtgtcctct

SEQ ID NO: 2127037 - DNA, 15 bp, Homo sapiens
gtctggtgtcctcta

SEQ ID NO: 2127038 - DNA, 15 bp, Homo sapiens
tctggtgtcctctat

SEQ ID NO: 2127039 - DNA, 15 bp, Homo sapiens
ctggtgtcctctatt

SEQ ID NO: 2127040 - DNA, 15 bp, Homo sapiens
tggtgtcctctattc

SEQ ID NO: 2127041 - DNA, 15 bp, Homo sapiens
ggtgtcctctattca

SEQ ID NO: 2127042 - DNA, 15 bp, Homo sapiens
gtgtcctctattcag

SEQ ID NO: 2127043 - DNA, 15 bp, Homo sapiens
tgtcctctattcaga

SEQ ID NO: 2127044 - DNA, 15 bp, Homo sapiens
gtcctctattcagac

SEQ ID NO: 2127045 - DNA, 15 bp, Homo sapiens
tcctctattcagact

SEQ ID NO: 2127046 - DNA, 15 bp, Homo sapiens
cctctattcagactt

SEQ ID NO: 2127047 - DNA, 15 bp, Homo sapiens
ctctattcagactta

SEQ ID NO: 2127048 - DNA, 15 bp, Homo sapiens
tctattcagacttat

SEQ ID NO: 2127049 - DNA, 15 bp, Homo sapiens
ctattcagacttatt

SEQ ID NO: 2127050 - DNA, 15 bp, Homo sapiens
tattcagacttatta

SEQ ID NO: 2127051 - DNA, 15 bp, Homo sapiens
attcagacttattat

SEQ ID NO: 2127052 - DNA, 15 bp, Homo sapiens
ttcagacttattata

SEQ ID NO: 2127053 - DNA, 15 bp, Homo sapiens
tcagacttattatat

SEQ ID NO: 2127054 - DNA, 15 bp, Homo sapiens
cagacttattatatt

SEQ ID NO: 2127055 - DNA, 15 bp, Homo sapiens
agacttattatattg

SEQ ID NO: 2127056 - DNA, 15 bp, Homo sapiens
gacttattatattgg

SEQ ID NO: 2127057 - DNA, 15 bp, Homo sapiens
acttattatattgga

SEQ ID NO: 2127058 - DNA, 15 bp, Homo sapiens
cttattatattggag

SEQ ID NO: 2127059 - DNA, 15 bp, Homo sapiens
ttattatattggagt

SEQ ID NO: 2127060 - DNA, 15 bp, Homo sapiens
tattatattggagta

SEQ ID NO: 2127061 - DNA, 15 bp, Homo sapiens
attatattggagtat

SEQ ID NO: 2127062 - DNA, 15 bp, Homo sapiens
ttatattggagtatt

SEQ ID NO: 2127063 - DNA, 15 bp, Homo sapiens
tatattggagtattt

SEQ ID NO: 2127064 - DNA, 15 bp, Homo sapiens
atattggagtatttc

SEQ ID NO: 2127065 - DNA, 15 bp, Homo sapiens
tattggagtatttca

SEQ ID NO: 2127066 - DNA, 15 bp, Homo sapiens
attggagtatttcaa

SEQ ID NO: 2127067 - DNA, 15 bp, Homo sapiens
ttggagtatttcaat

SEQ ID NO: 2127068 - DNA, 15 bp, Homo sapiens
tggagtatttcaatt

SEQ ID NO: 2127069 - DNA, 15 bp, Homo sapiens
ggagtatttcaattt

SEQ ID NO: 2127070 - DNA, 15 bp, Homo sapiens
gagtatttcaatttt

SEQ ID NO: 2127071 - DNA, 15 bp, Homo sapiens
agtatttcaattttt

SEQ ID NO: 2127072 - DNA, 15 bp, Homo sapiens
gtatttcaatttttc

SEQ ID NO: 2127073 - DNA, 15 bp, Homo sapiens
tatttcaatttttcg

SEQ ID NO: 2127074 - DNA, 15 bp, Homo sapiens
atttcaatttttcgt

SEQ ID NO: 2127075 - DNA, 15 bp, Homo sapiens
tttcaatttttcgtt

SEQ ID NO: 2127076 - DNA, 15 bp, Homo sapiens
ttcaatttttcgttg

SEQ ID NO: 2127077 - DNA, 15 bp, Homo sapiens
tcaatttttcgttgt

SEQ ID NO: 2127078 - DNA, 15 bp, Homo sapiens
caatttttcgttgta

SEQ ID NO: 2127079 - DNA, 15 bp, Homo sapiens
aatttttcgttgtat

SEQ ID NO: 2127080 - DNA, 15 bp, Homo sapiens
atttttcgttgtatc

SEQ ID NO: 2127081 - DNA, 15 bp, Homo sapiens
tttttcgttgtatcc

SEQ ID NO: 2127082 - DNA, 15 bp, Homo sapiens
ttttcgttgtatcct

SEQ ID NO: 2127083 - DNA, 15 bp, Homo sapiens
tttcgttgtatcctg

SEQ ID NO: 2127084 - DNA, 15 bp, Homo sapiens
ttcgttgtatcctgc

SEQ ID NO: 2127085 - DNA, 15 bp, Homo sapiens
tcgttgtatcctgcc

SEQ ID NO: 2127086 - DNA, 15 bp, Homo sapiens
cgttgtatcctgcct

SEQ ID NO: 2127087 - DNA, 15 bp, Homo sapiens
gttgtatcctgcctg

SEQ ID NO: 2127088 - DNA, 15 bp, Homo sapiens
ttgtatcctgcctgc

SEQ ID NO: 2127089 - DNA, 15 bp, Homo sapiens
tgtatcctgcctgcc

SEQ ID NO: 2127090 - DNA, 15 bp, Homo sapiens
gtatcctgcctgcct

SEQ ID NO: 2127091 - DNA, 15 bp, Homo sapiens
tatcctgcctgccta

SEQ ID NO: 2127092 - DNA, 15 bp, Homo sapiens
atcctgcctgcctag

SEQ ID NO: 2127093 - DNA, 15 bp, Homo sapiens
tcctgcctgcctagc

SEQ ID NO: 2127094 - DNA, 15 bp, Homo sapiens
cctgcctgcctagca

SEQ ID NO: 2127095 - DNA, 15 bp, Homo sapiens
ctgcctgcctagcat

SEQ ID NO: 2127096 - DNA, 15 bp, Homo sapiens
tgcctgcctagcatc

SEQ ID NO: 2127097 - DNA, 15 bp, Homo sapiens
gcctgcctagcatcc

SEQ ID NO: 2127098 - DNA, 15 bp, Homo sapiens
cctgcctagcatcca

SEQ ID NO: 2127099 - DNA, 15 bp, Homo sapiens
ctgcctagcatccag

SEQ ID NO: 2127100 - DNA, 15 bp, Homo sapiens
tgcctagcatccagt

SEQ ID NO: 2127101 - DNA, 15 bp, Homo sapiens
gcctagcatccagtt

SEQ ID NO: 2127102 - DNA, 15 bp, Homo sapiens
cctagcatccagttc

SEQ ID NO: 2127103 - DNA, 15 bp, Homo sapiens
ctagcatccagttcc

SEQ ID NO: 2127104 - DNA, 15 bp, Homo sapiens
tagcatccagttcct

SEQ ID NO: 2127105 - DNA, 15 bp, Homo sapiens
agcatccagttcctc

SEQ ID NO: 2127106 - DNA, 15 bp, Homo sapiens
gcatccagttcctcc

SEQ ID NO: 2127107 - DNA, 15 bp, Homo sapiens
catccagttcctccc

SEQ ID NO: 2127108 - DNA, 15 bp, Homo sapiens
atccagttcctcccc

SEQ ID NO: 2127109 - DNA, 15 bp, Homo sapiens
tccagttcctcccca

SEQ ID NO: 2127110 - DNA, 15 bp, Homo sapiens
ccagttcctccccag

SEQ ID NO: 2127111 - DNA, 15 bp, Homo sapiens
cagttcctccccagc

SEQ ID NO: 2127112 - DNA, 15 bp, Homo sapiens
agttcctccccagcc

SEQ ID NO: 2127113 - DNA, 15 bp, Homo sapiens
gttcctccccagccc

SEQ ID NO: 2127114 - DNA, 15 bp, Homo sapiens
ttcctccccagccct

SEQ ID NO: 2127115 - DNA, 15 bp, Homo sapiens
tcctccccagccctg

SEQ ID NO: 2127116 - DNA, 15 bp, Homo sapiens
cctccccagccctgc

SEQ ID NO: 2127117 - DNA, 15 bp, Homo sapiens
ctccccagccctgct

SEQ ID NO: 2127118 - DNA, 15 bp, Homo sapiens
tccccagccctgctc

SEQ ID NO: 2127119 - DNA, 15 bp, Homo sapiens
ccccagccctgctcc

SEQ ID NO: 2127120 - DNA, 15 bp, Homo sapiens
cccagccctgctccc

SEQ ID NO: 2127121 - DNA, 15 bp, Homo sapiens
ccagccctgctccca

SEQ ID NO: 2127122 - DNA, 15 bp, Homo sapiens
cagccctgctcccag

SEQ ID NO: 2127123 - DNA, 15 bp, Homo sapiens
agccctgctcccagc

SEQ ID NO: 2127124 - DNA, 15 bp, Homo sapiens
gccctgctcccagca

SEQ ID NO: 2127125 - DNA, 15 bp, Homo sapiens
ccctgctcccagcaa

SEQ ID NO: 2127126 - DNA, 15 bp, Homo sapiens
cctgctcccagcaaa

SEQ ID NO: 2127127 - DNA, 15 bp, Homo sapiens
ctgctcccagcaaac

SEQ ID NO: 2127128 - DNA, 15 bp, Homo sapiens
tgctcccagcaaacc

SEQ ID NO: 2127129 - DNA, 15 bp, Homo sapiens
gctcccagcaaaccc

SEQ ID NO: 2127130 - DNA, 15 bp, Homo sapiens
ctcccagcaaacccc

SEQ ID NO: 2127131 - DNA, 15 bp, Homo sapiens
tcccagcaaacccct

SEQ ID NO: 2127132 - DNA, 15 bp, Homo sapiens
cccagcaaaccccta

SEQ ID NO: 2127133 - DNA, 15 bp, Homo sapiens
ccagcaaacccctag

SEQ ID NO: 2127134 - DNA, 15 bp, Homo sapiens
cagcaaacccctagt

SEQ ID NO: 2127135 - DNA, 15 bp, Homo sapiens
agcaaacccctagtc

SEQ ID NO: 2127136 - DNA, 15 bp, Homo sapiens
gcaaacccctagtct

SEQ ID NO: 2127137 - DNA, 15 bp, Homo sapiens
caaacccctagtcta

SEQ ID NO: 2127138 - DNA, 15 bp, Homo sapiens
aaacccctagtctag

SEQ ID NO: 2127139 - DNA, 15 bp, Homo sapiens
aacccctagtctagc

SEQ ID NO: 2127140 - DNA, 15 bp, Homo sapiens
acccctagtctagcc

SEQ ID NO: 2127141 - DNA, 15 bp, Homo sapiens
cccctagtctagccc

SEQ ID NO: 2127142 - DNA, 15 bp, Homo sapiens
ccctagtctagcccc

SEQ ID NO: 2127143 - DNA, 15 bp, Homo sapiens
cctagtctagcccca

SEQ ID NO: 2127144 - DNA, 15 bp, Homo sapiens
ctagtctagccccag

SEQ ID NO: 2127145 - DNA, 15 bp, Homo sapiens
tagtctagccccagc

SEQ ID NO: 2127146 - DNA, 15 bp, Homo sapiens
agtctagccccagcc

SEQ ID NO: 2127147 - DNA, 15 bp, Homo sapiens
gtctagccccagccc

SEQ ID NO: 2127148 - DNA, 15 bp, Homo sapiens
ctagccccagcccta

SEQ ID NO: 2127149 - DNA, 15 bp, Homo sapiens
tagccccagccctac

SEQ ID NO: 2127150 - DNA, 15 bp, Homo sapiens
agccccagccctact

SEQ ID NO: 2127151 - DNA, 15 bp, Homo sapiens
gccccagccctactc

SEQ ID NO: 2127152 - DNA, 15 bp, Homo sapiens
ccccagccctactcc

SEQ ID NO: 2127153 - DNA, 15 bp, Homo sapiens
cccagccctactccc

SEQ ID NO: 2127154 - DNA, 15 bp, Homo sapiens
ccagccctactccca

SEQ ID NO: 2127155 - DNA, 15 bp, Homo sapiens
cagccctactcccac

SEQ ID NO: 2127156 - DNA, 15 bp, Homo sapiens
agccctactcccacc

SEQ ID NO: 2127157 - DNA, 15 bp, Homo sapiens
gccctactcccaccc

SEQ ID NO: 2127158 - DNA, 15 bp, Homo sapiens
ccctactcccacccc

SEQ ID NO: 2127159 - DNA, 15 bp, Homo sapiens
cctactcccaccccg

SEQ ID NO: 2127160 - DNA, 15 bp, Homo sapiens
ctactcccaccccgc

SEQ ID NO: 2127161 - DNA, 15 bp, Homo sapiens
tactcccaccccgcc

SEQ ID NO: 2127162 - DNA, 15 bp, Homo sapiens
actcccaccccgccc

SEQ ID NO: 2127163 - DNA, 15 bp, Homo sapiens
ctcccaccccgcccc

SEQ ID NO: 2127164 - DNA, 15 bp, Homo sapiens
tcccaccccgcccca

SEQ ID NO: 2127165 - DNA, 15 bp, Homo sapiens
cccaccccgccccag

SEQ ID NO: 2127166 - DNA, 15 bp, Homo sapiens
ccaccccgccccagc

SEQ ID NO: 2127167 - DNA, 15 bp, Homo sapiens
caccccgccccagcc

SEQ ID NO: 2127168 - DNA, 15 bp, Homo sapiens
accccgccccagccc

SEQ ID NO: 2127169 - DNA, 15 bp, Homo sapiens
ccccgccccagccct

SEQ ID NO: 2127170 - DNA, 15 bp, Homo sapiens
cccgccccagccctg

SEQ ID NO: 2127171 - DNA, 15 bp, Homo sapiens
ccgccccagccctgc

SEQ ID NO: 2127172 - DNA, 15 bp, Homo sapiens
cgccccagccctgcc

SEQ ID NO: 2127173 - DNA, 15 bp, Homo sapiens
gccccagccctgccc

SEQ ID NO: 2127174 - DNA, 15 bp, Homo sapiens
ccccagccctgcccc

SEQ ID NO: 2127175 - DNA, 15 bp, Homo sapiens
cagccctgccccagc

SEQ ID NO: 2127176 - DNA, 15 bp, Homo sapiens
agccctgccccagcc

SEQ ID NO: 2127177 - DNA, 15 bp, Homo sapiens
gccctgccccagccc

SEQ ID NO: 2127178 - DNA, 15 bp, Homo sapiens
cctgccccagcccca

SEQ ID NO: 2127179 - DNA, 15 bp, Homo sapiens
ctgccccagccccag

SEQ ID NO: 2127180 - DNA, 15 bp, Homo sapiens
tgccccagccccagt

SEQ ID NO: 2127181 - DNA, 15 bp, Homo sapiens
gccccagccccagtc

SEQ ID NO: 2127182 - DNA, 15 bp, Homo sapiens
ccccagccccagtcc

SEQ ID NO: 2127183 - DNA, 15 bp, Homo sapiens
cccagccccagtccc

SEQ ID NO: 2127184 - DNA, 15 bp, Homo sapiens
ccagccccagtcccc

SEQ ID NO: 2127185 - DNA, 15 bp, Homo sapiens
cagccccagtcccct

SEQ ID NO: 2127186 - DNA, 15 bp, Homo sapiens
agccccagtccccta

SEQ ID NO: 2127187 - DNA, 15 bp, Homo sapiens
gccccagtcccctaa

SEQ ID NO: 2127188 - DNA, 15 bp, Homo sapiens
ccccagtcccctaac

SEQ ID NO: 2127189 - DNA, 15 bp, Homo sapiens
cccagtcccctaacc

SEQ ID NO: 2127190 - DNA, 15 bp, Homo sapiens
ccagtcccctaaccc

SEQ ID NO: 2127191 - DNA, 15 bp, Homo sapiens
cagtcccctaacccc

SEQ ID NO: 2127192 - DNA, 15 bp, Homo sapiens
agtcccctaaccccc

SEQ ID NO: 2127193 - DNA, 15 bp, Homo sapiens
gtcccctaacccccc

SEQ ID NO: 2127194 - DNA, 15 bp, Homo sapiens
tcccctaacccccca

SEQ ID NO: 2127195 - DNA, 15 bp, Homo sapiens
cccctaaccccccag

SEQ ID NO: 2127196 - DNA, 15 bp, Homo sapiens
ccctaaccccccagc

SEQ ID NO: 2127197 - DNA, 15 bp, Homo sapiens
cctaaccccccagcc

SEQ ID NO: 2127198 - DNA, 15 bp, Homo sapiens
ctaaccccccagccc

SEQ ID NO: 2127199 - DNA, 15 bp, Homo sapiens
taaccccccagccct

SEQ ID NO: 2127200 - DNA, 15 bp, Homo sapiens
aaccccccagcccta

SEQ ID NO: 2127201 - DNA, 15 bp, Homo sapiens
cacaaccatgcacct

SEQ ID NO: 2127202 - DNA, 15 bp, Homo sapiens
acaaccatgcacctt

SEQ ID NO: 2127203 - DNA, 15 bp, Homo sapiens
caaccatgcacctta

SEQ ID NO: 2127204 - DNA, 15 bp, Homo sapiens
aaccatgcaccttag

SEQ ID NO: 2127205 - DNA, 15 bp, Homo sapiens
accatgcaccttaga

SEQ ID NO: 2127206 - DNA, 15 bp, Homo sapiens
ccatgcaccttagac

SEQ ID NO: 2127207 - DNA, 15 bp, Homo sapiens
catgcaccttagaca

SEQ ID NO: 2127208 - DNA, 15 bp, Homo sapiens
atgcaccttagacat

SEQ ID NO: 2127209 - DNA, 15 bp, Homo sapiens
tgcaccttagacatg

SEQ ID NO: 2127210 - DNA, 15 bp, Homo sapiens
gcaccttagacatgg

SEQ ID NO: 2127211 - DNA, 15 bp, Homo sapiens
caccttagacatgga

SEQ ID NO: 2127212 - DNA, 15 bp, Homo sapiens
accttagacatggat

SEQ ID NO: 2127213 - DNA, 15 bp, Homo sapiens
ccttagacatggatt

SEQ ID NO: 2127214 - DNA, 15 bp, Homo sapiens
cttagacatggattt

SEQ ID NO: 2127215 - DNA, 15 bp, Homo sapiens
ttagacatggatttg

SEQ ID NO: 2127216 - DNA, 15 bp, Homo sapiens
tagacatggatttgc

SEQ ID NO: 2127217 - DNA, 15 bp, Homo sapiens
agacatggatttgca

SEQ ID NO: 2127218 - DNA, 15 bp, Homo sapiens
gacatggatttgcat

SEQ ID NO: 2127219 - DNA, 15 bp, Homo sapiens
acatggatttgcata

SEQ ID NO: 2127220 - DNA, 15 bp, Homo sapiens
catggatttgcataa

SEQ ID NO: 2127221 - DNA, 15 bp, Homo sapiens
atggatttgcataac

SEQ ID NO: 2127222 - DNA, 15 bp, Homo sapiens
tggatttgcataact

SEQ ID NO: 2127223 - DNA, 15 bp, Homo sapiens
ggatttgcataacta

SEQ ID NO: 2127224 - DNA, 15 bp, Homo sapiens
gatttgcataactac

SEQ ID NO: 2127225 - DNA, 15 bp, Homo sapiens
atttgcataactaca

SEQ ID NO: 2127226 - DNA, 15 bp, Homo sapiens
tttgcataactacac

SEQ ID NO: 2127227 - DNA, 15 bp, Homo sapiens
ttgcataactacaca

SEQ ID NO: 2127228 - DNA, 15 bp, Homo sapiens
tgcataactacacac

SEQ ID NO: 2127229 - DNA, 15 bp, Homo sapiens
gcataactacacaca

SEQ ID NO: 2127230 - DNA, 15 bp, Homo sapiens
cataactacacacag

SEQ ID NO: 2127231 - DNA, 15 bp, Homo sapiens
ataactacacacagc

SEQ ID NO: 2127232 - DNA, 15 bp, Homo sapiens
taactacacacagct

SEQ ID NO: 2127233 - DNA, 15 bp, Homo sapiens
aactacacacagctc

SEQ ID NO: 2127234 - DNA, 15 bp, Homo sapiens
actacacacagctca

SEQ ID NO: 2127235 - DNA, 15 bp, Homo sapiens
ctacacacagctcaa

SEQ ID NO: 2127236 - DNA, 15 bp, Homo sapiens
tacacacagctcaac

SEQ ID NO: 2127237 - DNA, 15 bp, Homo sapiens
acacacagctcaacc

SEQ ID NO: 2127238 - DNA, 15 bp, Homo sapiens
cacacagctcaacct

SEQ ID NO: 2127239 - DNA, 15 bp, Homo sapiens
acacagctcaaccta

SEQ ID NO: 2127240 - DNA, 15 bp, Homo sapiens
cacagctcaacctat

SEQ ID NO: 2127241 - DNA, 15 bp, Homo sapiens
acagctcaacctatc

SEQ ID NO: 2127242 - DNA, 15 bp, Homo sapiens
cagctcaacctatct

SEQ ID NO: 2127243 - DNA, 15 bp, Homo sapiens
agctcaacctatctg

SEQ ID NO: 2127244 - DNA, 15 bp, Homo sapiens
gctcaacctatctga

SEQ ID NO: 2127245 - DNA, 15 bp, Homo sapiens
ctcaacctatctgaa

SEQ ID NO: 2127246 - DNA, 15 bp, Homo sapiens
tcaacctatctgaat

SEQ ID NO: 2127247 - DNA, 15 bp, Homo sapiens
caacctatctgaata

SEQ ID NO: 2127248 - DNA, 15 bp, Homo sapiens
aacctatctgaataa

SEQ ID NO: 2127249 - DNA, 15 bp, Homo sapiens
acctatctgaataaa

SEQ ID NO: 2127250 - DNA, 15 bp, Homo sapiens
cctatctgaataaaa

SEQ ID NO: 2127251 - DNA, 15 bp, Homo sapiens
ctatctgaataaaat

SEQ ID NO: 2127252 - DNA, 15 bp, Homo sapiens
tatctgaataaaatc

SEQ ID NO: 2127253 - DNA, 15 bp, Homo sapiens
atctgaataaaatcc

SEQ ID NO: 2127254 - DNA, 15 bp, Homo sapiens
tctgaataaaatcct

SEQ ID NO: 2127255 - DNA, 15 bp, Homo sapiens
ctgaataaaatccta

SEQ ID NO: 2127256 - DNA, 15 bp, Homo sapiens
tgaataaaatcctac

SEQ ID NO: 2127257 - DNA, 15 bp, Homo sapiens
gaataaaatcctact

SEQ ID NO: 2127258 - DNA, 15 bp, Homo sapiens
aataaaatcctactc

SEQ ID NO: 2127259 - DNA, 15 bp, Homo sapiens
ataaaatcctactct

SEQ ID NO: 2127260 - DNA, 15 bp, Homo sapiens
taaaatcctactctc

SEQ ID NO: 2127261 - DNA, 15 bp, Homo sapiens
aaaatcctactctca

SEQ ID NO: 2127262 - DNA, 15 bp, Homo sapiens
aaatcctactctcag

SEQ ID NO: 2127263 - DNA, 15 bp, Homo sapiens
aatcctactctcaga

SEQ ID NO: 2127264 - DNA, 15 bp, Homo sapiens
atcctactctcagac

SEQ ID NO: 2127265 - DNA, 15 bp, Homo sapiens
tcctactctcagacc

SEQ ID NO: 2127266 - DNA, 15 bp, Homo sapiens
cctactctcagaccc

SEQ ID NO: 2127267 - DNA, 15 bp, Homo sapiens
ctactctcagacccc

SEQ ID NO: 2127268 - DNA, 15 bp, Homo sapiens
tactctcagacccct

SEQ ID NO: 2127269 - DNA, 15 bp, Homo sapiens
actctcagacccctt

SEQ ID NO: 2127270 - DNA, 15 bp, Homo sapiens
ctctcagaccccttt

SEQ ID NO: 2127271 - DNA, 15 bp, Homo sapiens
tctcagacccctttt

SEQ ID NO: 2127272 - DNA, 15 bp, Homo sapiens
ctcagaccccttttg

SEQ ID NO: 2127273 - DNA, 15 bp, Homo sapiens
tcagaccccttttgc

SEQ ID NO: 2127274 - DNA, 15 bp, Homo sapiens
cagaccccttttgca

SEQ ID NO: 2127275 - DNA, 15 bp, Homo sapiens
agaccccttttgcag

SEQ ID NO: 2127276 - DNA, 15 bp, Homo sapiens
gaccccttttgcagt

SEQ ID NO: 2127277 - DNA, 15 bp, Homo sapiens
accccttttgcagta

SEQ ID NO: 2127278 - DNA, 15 bp, Homo sapiens
ccccttttgcagtac

SEQ ID NO: 2127279 - DNA, 15 bp, Homo sapiens
cccttttgcagtaca

SEQ ID NO: 2127280 - DNA, 15 bp, Homo sapiens
ccttttgcagtacag

SEQ ID NO: 2127281 - DNA, 15 bp, Homo sapiens
cttttgcagtacagc

SEQ ID NO: 2127282 - DNA, 15 bp, Homo sapiens
ttttgcagtacagca

SEQ ID NO: 2127283 - DNA, 15 bp, Homo sapiens
tttgcagtacagcag

SEQ ID NO: 2127284 - DNA, 15 bp, Homo sapiens
ttgcagtacagcagg

SEQ ID NO: 2127285 - DNA, 15 bp, Homo sapiens
tgcagtacagcaggg

SEQ ID NO: 2127286 - DNA, 15 bp, Homo sapiens
gcagtacagcagggg

SEQ ID NO: 2127287 - DNA, 15 bp, Homo sapiens
cagtacagcaggggt

SEQ ID NO: 2127288 - DNA, 15 bp, Homo sapiens
agtacagcaggggtg

SEQ ID NO: 2127289 - DNA, 15 bp, Homo sapiens
gtacagcaggggtgc

SEQ ID NO: 2127290 - DNA, 15 bp, Homo sapiens
tacagcaggggtgct

SEQ ID NO: 2127291 - DNA, 15 bp, Homo sapiens
acagcaggggtgctg

SEQ ID NO: 2127292 - DNA, 15 bp, Homo sapiens
cagcaggggtgctga

SEQ ID NO: 2127293 - DNA, 15 bp, Homo sapiens
agcaggggtgctgat

SEQ ID NO: 2127294 - DNA, 15 bp, Homo sapiens
gcaggggtgctgatc

SEQ ID NO: 2127295 - DNA, 15 bp, Homo sapiens
caggggtgctgatca

SEQ ID NO: 2127296 - DNA, 15 bp, Homo sapiens
aggggtgctgatcac

SEQ ID NO: 2127297 - DNA, 15 bp, Homo sapiens
ggggtgctgatcacc

SEQ ID NO: 2127298 - DNA, 15 bp, Homo sapiens
gggtgctgatcacca

SEQ ID NO: 2127299 - DNA, 15 bp, Homo sapiens
ggtgctgatcaccaa

SEQ ID NO: 2127300 - DNA, 15 bp, Homo sapiens
gtgctgatcaccaag

SEQ ID NO: 2127301 - DNA, 15 bp, Homo sapiens
tgctgatcaccaagg

SEQ ID NO: 2127302 - DNA, 15 bp, Homo sapiens
gctgatcaccaaggc

SEQ ID NO: 2127303 - DNA, 15 bp, Homo sapiens
ctgatcaccaaggcc

SEQ ID NO: 2127304 - DNA, 15 bp, Homo sapiens
tgatcaccaaggccc

SEQ ID NO: 2127305 - DNA, 15 bp, Homo sapiens
gatcaccaaggccct

SEQ ID NO: 2127306 - DNA, 15 bp, Homo sapiens
atcaccaaggccctt

SEQ ID NO: 2127307 - DNA, 15 bp, Homo sapiens
tcaccaaggcccttt

SEQ ID NO: 2127308 - DNA, 15 bp, Homo sapiens
caccaaggccctttt

SEQ ID NO: 2127309 - DNA, 15 bp, Homo sapiens
accaaggcccttttt

SEQ ID NO: 2127310 - DNA, 15 bp, Homo sapiens
ccaaggccctttttc

SEQ ID NO: 2127311 - DNA, 15 bp, Homo sapiens
caaggccctttttcc

SEQ ID NO: 2127312 - DNA, 15 bp, Homo sapiens
aaggccctttttcct

SEQ ID NO: 2127313 - DNA, 15 bp, Homo sapiens
aggccctttttcctg

SEQ ID NO: 2127314 - DNA, 15 bp, Homo sapiens
ggccctttttcctgg

SEQ ID NO: 2127315 - DNA, 15 bp, Homo sapiens
gccctttttcctggc

SEQ ID NO: 2127316 - DNA, 15 bp, Homo sapiens
ccctttttcctggcc

SEQ ID NO: 2127317 - DNA, 15 bp, Homo sapiens
cctttttcctggcct

SEQ ID NO: 2127318 - DNA, 15 bp, Homo sapiens
ctttttcctggcctg

SEQ ID NO: 2127319 - DNA, 15 bp, Homo sapiens
tttttcctggcctgg

SEQ ID NO: 2127320 - DNA, 15 bp, Homo sapiens
ttttcctggcctggt

SEQ ID NO: 2127321 - DNA, 15 bp, Homo sapiens
tttcctggcctggta

SEQ ID NO: 2127322 - DNA, 15 bp, Homo sapiens
ttcctggcctggtat

SEQ ID NO: 2127323 - DNA, 15 bp, Homo sapiens
tcctggcctggtatg

SEQ ID NO: 2127324 - DNA, 15 bp, Homo sapiens
cctggcctggtatgc

SEQ ID NO: 2127325 - DNA, 15 bp, Homo sapiens
ctggcctggtatgcg

SEQ ID NO: 2127326 - DNA, 15 bp, Homo sapiens
tggcctggtatgcgt

SEQ ID NO: 2127327 - DNA, 15 bp, Homo sapiens
ggcctggtatgcgtg

SEQ ID NO: 2127328 - DNA, 15 bp, Homo sapiens
gcctggtatgcgtgt

SEQ ID NO: 2127329 - DNA, 15 bp, Homo sapiens
cctggtatgcgtgtg

SEQ ID NO: 2127330 - DNA, 15 bp, Homo sapiens
ctggtatgcgtgtga

SEQ ID NO: 2127331 - DNA, 15 bp, Homo sapiens
tggtatgcgtgtgat

SEQ ID NO: 2127332 - DNA, 15 bp, Homo sapiens
ggtatgcgtgtgatt

SEQ ID NO: 2127333 - DNA, 15 bp, Homo sapiens
gtatgcgtgtgatta

SEQ ID NO: 2127334 - DNA, 15 bp, Homo sapiens
tatgcgtgtgattat

SEQ ID NO: 2127335 - DNA, 15 bp, Homo sapiens
atgcgtgtgattatg

SEQ ID NO: 2127336 - DNA, 15 bp, Homo sapiens
tgcgtgtgattatgt

SEQ ID NO: 2127337 - DNA, 15 bp, Homo sapiens
gcgtgtgattatgtt

SEQ ID NO: 2127338 - DNA, 15 bp, Homo sapiens
cgtgtgattatgttt

SEQ ID NO: 2127339 - DNA, 15 bp, Homo sapiens
gtgtgattatgtttg

SEQ ID NO: 2127340 - DNA, 15 bp, Homo sapiens
tgtgattatgtttgt

SEQ ID NO: 2127341 - DNA, 15 bp, Homo sapiens
gtgattatgtttgtc

SEQ ID NO: 2127342 - DNA, 15 bp, Homo sapiens
tgattatgtttgtcc

SEQ ID NO: 2127343 - DNA, 15 bp, Homo sapiens
gattatgtttgtccc

SEQ ID NO: 2127344 - DNA, 15 bp, Homo sapiens
attatgtttgtcccg

SEQ ID NO: 2127345 - DNA, 15 bp, Homo sapiens
ttatgtttgtcccgg

SEQ ID NO: 2127346 - DNA, 15 bp, Homo sapiens
tatgtttgtcccggt

SEQ ID NO: 2127347 - DNA, 15 bp, Homo sapiens
atgtttgtcccggtt

SEQ ID NO: 2127348 - DNA, 15 bp, Homo sapiens
tgtttgtcccggttc

SEQ ID NO: 2127349 - DNA, 15 bp, Homo sapiens
gtttgtcccggttcc

SEQ ID NO: 2127350 - DNA, 15 bp, Homo sapiens
tttgtcccggttcct

SEQ ID NO: 2127351 - DNA, 15 bp, Homo sapiens
ttgtcccggttcctg

SEQ ID NO: 2127352 - DNA, 15 bp, Homo sapiens
tgtcccggttcctgt

SEQ ID NO: 2127353 - DNA, 15 bp, Homo sapiens
gtcccggttcctgtg

SEQ ID NO: 2127354 - DNA, 15 bp, Homo sapiens
tcccggttcctgtgt

SEQ ID NO: 2127355 - DNA, 15 bp, Homo sapiens
cccggttcctgtgta

SEQ ID NO: 2127356 - DNA, 15 bp, Homo sapiens
ccggttcctgtgtat

SEQ ID NO: 2127357 - DNA, 15 bp, Homo sapiens
cggttcctgtgtatt

SEQ ID NO: 2127358 - DNA, 15 bp, Homo sapiens
ggttcctgtgtatta

SEQ ID NO: 2127359 - DNA, 15 bp, Homo sapiens
gttcctgtgtattag

SEQ ID NO: 2127360 - DNA, 15 bp, Homo sapiens
ttcctgtgtattaga

SEQ ID NO: 2127361 - DNA, 15 bp, Homo sapiens
tcctgtgtattagac

SEQ ID NO: 2127362 - DNA, 15 bp, Homo sapiens
cctgtgtattagaca

SEQ ID NO: 2127363 - DNA, 15 bp, Homo sapiens
ctgtgtattagacat

SEQ ID NO: 2127364 - DNA, 15 bp, Homo sapiens
tgtgtattagacatg

SEQ ID NO: 2127365 - DNA, 15 bp, Homo sapiens
gtgtattagacatgg

SEQ ID NO: 2127366 - DNA, 15 bp, Homo sapiens
tgtattagacatgga

SEQ ID NO: 2127367 - DNA, 15 bp, Homo sapiens
gtattagacatggaa

SEQ ID NO: 2127368 - DNA, 15 bp, Homo sapiens
tattagacatggaag

SEQ ID NO: 2127369 - DNA, 15 bp, Homo sapiens
attagacatggaagc

SEQ ID NO: 2127370 - DNA, 15 bp, Homo sapiens
ttagacatggaagcc

SEQ ID NO: 2127371 - DNA, 15 bp, Homo sapiens
tagacatggaagcct

SEQ ID NO: 2127372 - DNA, 15 bp, Homo sapiens
agacatggaagcctc

SEQ ID NO: 2127373 - DNA, 15 bp, Homo sapiens
gacatggaagcctcc

SEQ ID NO: 2127374 - DNA, 15 bp, Homo sapiens
acatggaagcctccc

SEQ ID NO: 2127375 - DNA, 15 bp, Homo sapiens
catggaagcctcccc

SEQ ID NO: 2127376 - DNA, 15 bp, Homo sapiens
atggaagcctcccct

SEQ ID NO: 2127377 - DNA, 15 bp, Homo sapiens
tggaagcctcccctg

SEQ ID NO: 2127378 - DNA, 15 bp, Homo sapiens
ggaagcctcccctgc

SEQ ID NO: 2127379 - DNA, 15 bp, Homo sapiens
gaagcctcccctgcc

SEQ ID NO: 2127380 - DNA, 15 bp, Homo sapiens
agcctcccctgccac

SEQ ID NO: 2127381 - DNA, 15 bp, Homo sapiens
gcctcccctgccaca

SEQ ID NO: 2127382 - DNA, 15 bp, Homo sapiens
cctcccctgccacac

SEQ ID NO: 2127383 - DNA, 15 bp, Homo sapiens
ctcccctgccacact

SEQ ID NO: 2127384 - DNA, 15 bp, Homo sapiens
tcccctgccacactc

SEQ ID NO: 2127385 - DNA, 15 bp, Homo sapiens
cccctgccacactcc

SEQ ID NO: 2127386 - DNA, 15 bp, Homo sapiens
ccctgccacactcca

SEQ ID NO: 2127387 - DNA, 15 bp, Homo sapiens
cctgccacactccac

SEQ ID NO: 2127388 - DNA, 15 bp, Homo sapiens
ctgccacactccacc

SEQ ID NO: 2127389 - DNA, 15 bp, Homo sapiens
tgccacactccaccc

SEQ ID NO: 2127390 - DNA, 15 bp, Homo sapiens
gccacactccacccc

SEQ ID NO: 2127391 - DNA, 15 bp, Homo sapiens
ccacactccaccccc

SEQ ID NO: 2127392 - DNA, 15 bp, Homo sapiens
cacactccaccccca

SEQ ID NO: 2127393 - DNA, 15 bp, Homo sapiens
acactccacccccaa

SEQ ID NO: 2127394 - DNA, 15 bp, Homo sapiens
cactccacccccaat

SEQ ID NO: 2127395 - DNA, 15 bp, Homo sapiens
actccacccccaatc

SEQ ID NO: 2127396 - DNA, 15 bp, Homo sapiens
ctccacccccaatct

SEQ ID NO: 2127397 - DNA, 15 bp, Homo sapiens
tccacccccaatctt

SEQ ID NO: 2127398 - DNA, 15 bp, Homo sapiens
ccacccccaatcttc

SEQ ID NO: 2127399 - DNA, 15 bp, Homo sapiens
cacccccaatcttcc

SEQ ID NO: 2127400 - DNA, 15 bp, Homo sapiens
acccccaatcttcct

SEQ ID NO: 2127401 - DNA, 15 bp, Homo sapiens
cccccaatcttcctt

SEQ ID NO: 2127402 - DNA, 15 bp, Homo sapiens
ccccaatcttccttt

SEQ ID NO: 2127403 - DNA, 15 bp, Homo sapiens
cccaatcttcctttc

SEQ ID NO: 2127404 - DNA, 15 bp, Homo sapiens
ccaatcttcctttcc

SEQ ID NO: 2127405 - DNA, 15 bp, Homo sapiens
caatcttcctttccc

SEQ ID NO: 2127406 - DNA, 15 bp, Homo sapiens
aatcttcctttccct

SEQ ID NO: 2127407 - DNA, 15 bp, Homo sapiens
atcttcctttccctt

SEQ ID NO: 2127408 - DNA, 15 bp, Homo sapiens
tcttcctttcccttc

SEQ ID NO: 2127409 - DNA, 15 bp, Homo sapiens
cttcctttcccttcc

SEQ ID NO: 2127410 - DNA, 15 bp, Homo sapiens
ttcctttcccttccg

SEQ ID NO: 2127411 - DNA, 15 bp, Homo sapiens
tcctttcccttccgg

SEQ ID NO: 2127412 - DNA, 15 bp, Homo sapiens
cctttcccttccggc

SEQ ID NO: 2127413 - DNA, 15 bp, Homo sapiens
ctttcccttccggca

SEQ ID NO: 2127414 - DNA, 15 bp, Homo sapiens
tttcccttccggcag

SEQ ID NO: 2127415 - DNA, 15 bp, Homo sapiens
ttcccttccggcagg

SEQ ID NO: 2127416 - DNA, 15 bp, Homo sapiens
tcccttccggcaggg

SEQ ID NO: 2127417 - DNA, 15 bp, Homo sapiens
cccttccggcaggga

SEQ ID NO: 2127418 - DNA, 15 bp, Homo sapiens
ccttccggcagggag

SEQ ID NO: 2127419 - DNA, 15 bp, Homo sapiens
cttccggcagggagt

SEQ ID NO: 2127420 - DNA, 15 bp, Homo sapiens
ttccggcagggagtg

SEQ ID NO: 2127421 - DNA, 15 bp, Homo sapiens
tccggcagggagtgc

SEQ ID NO: 2127422 - DNA, 15 bp, Homo sapiens
ccggcagggagtgcc

SEQ ID NO: 2127423 - DNA, 15 bp, Homo sapiens
cggcagggagtgccc

SEQ ID NO: 2127424 - DNA, 15 bp, Homo sapiens
ggcagggagtgccct

SEQ ID NO: 2127425 - DNA, 15 bp, Homo sapiens
gcagggagtgccctc

SEQ ID NO: 2127426 - DNA, 15 bp, Homo sapiens
cagggagtgccctct

SEQ ID NO: 2127427 - DNA, 15 bp, Homo sapiens
agggagtgccctctc

SEQ ID NO: 2127428 - DNA, 15 bp, Homo sapiens
gggagtgccctctcc

SEQ ID NO: 2127429 - DNA, 15 bp, Homo sapiens
ggagtgccctctcca

SEQ ID NO: 2127430 - DNA, 15 bp, Homo sapiens
gagtgccctctccat

SEQ ID NO: 2127431 - DNA, 15 bp, Homo sapiens
agtgccctctccata

SEQ ID NO: 2127432 - DNA, 15 bp, Homo sapiens
gtgccctctccataa

SEQ ID NO: 2127433 - DNA, 15 bp, Homo sapiens
tgccctctccataag

SEQ ID NO: 2127434 - DNA, 15 bp, Homo sapiens
gccctctccataaga

SEQ ID NO: 2127435 - DNA, 15 bp, Homo sapiens
ccctctccataagac

SEQ ID NO: 2127436 - DNA, 15 bp, Homo sapiens
cctctccataagacg

SEQ ID NO: 2127437 - DNA, 15 bp, Homo sapiens
ctctccataagacgc

SEQ ID NO: 2127438 - DNA, 15 bp, Homo sapiens
tctccataagacgct

SEQ ID NO: 2127439 - DNA, 15 bp, Homo sapiens
ctccataagacgctt

SEQ ID NO: 2127440 - DNA, 15 bp, Homo sapiens
tccataagacgctta

SEQ ID NO: 2127441 - DNA, 15 bp, Homo sapiens
ccataagacgcttac

SEQ ID NO: 2127442 - DNA, 15 bp, Homo sapiens
cataagacgcttacg

SEQ ID NO: 2127443 - DNA, 15 bp, Homo sapiens
ataagacgcttacgt

SEQ ID NO: 2127444 - DNA, 15 bp, Homo sapiens
taagacgcttacgtt

SEQ ID NO: 2127445 - DNA, 15 bp, Homo sapiens
aagacgcttacgttt

SEQ ID NO: 2127446 - DNA, 15 bp, Homo sapiens
agacgcttacgtttg

SEQ ID NO: 2127447 - DNA, 15 bp, Homo sapiens
gacgcttacgtttgg

SEQ ID NO: 2127448 - DNA, 15 bp, Homo sapiens
acgcttacgtttgga

SEQ ID NO: 2127449 - DNA, 15 bp, Homo sapiens
cgcttacgtttggac

SEQ ID NO: 2127450 - DNA, 15 bp, Homo sapiens
gcttacgtttggaca

SEQ ID NO: 2127451 - DNA, 15 bp, Homo sapiens
cttacgtttggacaa

SEQ ID NO: 2127452 - DNA, 15 bp, Homo sapiens
ttacgtttggacaat

SEQ ID NO: 2127453 - DNA, 15 bp, Homo sapiens
tacgtttggacaatc

SEQ ID NO: 2127454 - DNA, 15 bp, Homo sapiens
acgtttggacaatca

SEQ ID NO: 2127455 - DNA, 15 bp, Homo sapiens
cgtttggacaatcaa

SEQ ID NO: 2127456 - DNA, 15 bp, Homo sapiens
gtttggacaatcaag

SEQ ID NO: 2127457 - DNA, 15 bp, Homo sapiens
tttggacaatcaagg

SEQ ID NO: 2127458 - DNA, 15 bp, Homo sapiens
ttggacaatcaaggt

SEQ ID NO: 2127459 - DNA, 15 bp, Homo sapiens
tggacaatcaaggtg

SEQ ID NO: 2127460 - DNA, 15 bp, Homo sapiens
ggacaatcaaggtgc

SEQ ID NO: 2127461 - DNA, 15 bp, Homo sapiens
gacaatcaaggtgca

SEQ ID NO: 2127462 - DNA, 15 bp, Homo sapiens
acaatcaaggtgcac

SEQ ID NO: 2127463 - DNA, 15 bp, Homo sapiens
caatcaaggtgcaca

SEQ ID NO: 2127464 - DNA, 15 bp, Homo sapiens
aatcaaggtgcacag

SEQ ID NO: 2127465 - DNA, 15 bp, Homo sapiens
atcaaggtgcacagt

SEQ ID NO: 2127466 - DNA, 15 bp, Homo sapiens
tcaaggtgcacagtt

SEQ ID NO: 2127467 - DNA, 15 bp, Homo sapiens
caaggtgcacagttg

SEQ ID NO: 2127468 - DNA, 15 bp, Homo sapiens
aaggtgcacagttgt

SEQ ID NO: 2127469 - DNA, 15 bp, Homo sapiens
aggtgcacagttgta

SEQ ID NO: 2127470 - DNA, 15 bp, Homo sapiens
ggtgcacagttgtaa

SEQ ID NO: 2127471 - DNA, 15 bp, Homo sapiens
gtgcacagttgtaag

SEQ ID NO: 2127472 - DNA, 15 bp, Homo sapiens
tgcacagttgtaagt

SEQ ID NO: 2127473 - DNA, 15 bp, Homo sapiens
gcacagttgtaagtg

SEQ ID NO: 2127474 - DNA, 15 bp, Homo sapiens
cacagttgtaagtga

SEQ ID NO: 2127475 - DNA, 15 bp, Homo sapiens
acagttgtaagtgac

SEQ ID NO: 2127476 - DNA, 15 bp, Homo sapiens
cagttgtaagtgacc

SEQ ID NO: 2127477 - DNA, 15 bp, Homo sapiens
agttgtaagtgacca

SEQ ID NO: 2127478 - DNA, 15 bp, Homo sapiens
gttgtaagtgaccac

SEQ ID NO: 2127479 - DNA, 15 bp, Homo sapiens
tgtaagtgaccacag

SEQ ID NO: 2127480 - DNA, 15 bp, Homo sapiens
gtaagtgaccacagg

SEQ ID NO: 2127481 - DNA, 15 bp, Homo sapiens
taagtgaccacaggc

SEQ ID NO: 2127482 - DNA, 15 bp, Homo sapiens
aagtgaccacaggca

SEQ ID NO: 2127483 - DNA, 15 bp, Homo sapiens
agtgaccacaggcat

SEQ ID NO: 2127484 - DNA, 15 bp, Homo sapiens
gtgaccacaggcata

SEQ ID NO: 2127485 - DNA, 15 bp, Homo sapiens
tgaccacaggcatac

SEQ ID NO: 2127486 - DNA, 15 bp, Homo sapiens
gaccacaggcataca

SEQ ID NO: 2127487 - DNA, 15 bp, Homo sapiens
accacaggcatacac

SEQ ID NO: 2127488 - DNA, 15 bp, Homo sapiens
ccacaggcatacacc

SEQ ID NO: 2127489 - DNA, 15 bp, Homo sapiens
cacaggcatacacct

SEQ ID NO: 2127490 - DNA, 15 bp, Homo sapiens
acaggcatacacctt

SEQ ID NO: 2127491 - DNA, 15 bp, Homo sapiens
caggcatacaccttg

SEQ ID NO: 2127492 - DNA, 15 bp, Homo sapiens
aggcatacaccttgg

SEQ ID NO: 2127493 - DNA, 15 bp, Homo sapiens
ggcatacaccttgga

SEQ ID NO: 2127494 - DNA, 15 bp, Homo sapiens
gcatacaccttggac

SEQ ID NO: 2127495 - DNA, 15 bp, Homo sapiens
catacaccttggaca

SEQ ID NO: 2127496 - DNA, 15 bp, Homo sapiens
atacaccttggacat

SEQ ID NO: 2127497 - DNA, 15 bp, Homo sapiens
tacaccttggacatt

SEQ ID NO: 2127498 - DNA, 15 bp, Homo sapiens
acaccttggacatta

SEQ ID NO: 2127499 - DNA, 15 bp, Homo sapiens
caccttggacattaa

SEQ ID NO: 2127500 - DNA, 15 bp, Homo sapiens
accttggacattaat

SEQ ID NO: 2127501 - DNA, 15 bp, Homo sapiens
ccttggacattaatg

SEQ ID NO: 2127502 - DNA, 15 bp, Homo sapiens
cttggacattaatgt

SEQ ID NO: 2127503 - DNA, 15 bp, Homo sapiens
ttggacattaatgtg

SEQ ID NO: 2127504 - DNA, 15 bp, Homo sapiens
tggacattaatgtgc

SEQ ID NO: 2127505 - DNA, 15 bp, Homo sapiens
ggacattaatgtgca

SEQ ID NO: 2127506 - DNA, 15 bp, Homo sapiens
gacattaatgtgcat

SEQ ID NO: 2127507 - DNA, 15 bp, Homo sapiens
acattaatgtgcata

SEQ ID NO: 2127508 - DNA, 15 bp, Homo sapiens
cattaatgtgcataa

SEQ ID NO: 2127509 - DNA, 15 bp, Homo sapiens
attaatgtgcataac

SEQ ID NO: 2127510 - DNA, 15 bp, Homo sapiens
ttaatgtgcataacc

SEQ ID NO: 2127511 - DNA, 15 bp, Homo sapiens
taatgtgcataacca

SEQ ID NO: 2127512 - DNA, 15 bp, Homo sapiens
aatgtgcataaccac

SEQ ID NO: 2127513 - DNA, 15 bp, Homo sapiens
atgtgcataaccact

SEQ ID NO: 2127514 - DNA, 15 bp, Homo sapiens
tgtgcataaccactt

SEQ ID NO: 2127515 - DNA, 15 bp, Homo sapiens
gtgcataaccacttt

SEQ ID NO: 2127516 - DNA, 15 bp, Homo sapiens
tgcataaccactttg

SEQ ID NO: 2127517 - DNA, 15 bp, Homo sapiens
gcataaccactttgc

SEQ ID NO: 2127518 - DNA, 15 bp, Homo sapiens
cataaccactttgcc

SEQ ID NO: 2127519 - DNA, 15 bp, Homo sapiens
ataaccactttgccc

SEQ ID NO: 2127520 - DNA, 15 bp, Homo sapiens
taaccactttgccca

SEQ ID NO: 2127521 - DNA, 15 bp, Homo sapiens
aaccactttgcccat

SEQ ID NO: 2127522 - DNA, 15 bp, Homo sapiens
accactttgcccatt

SEQ ID NO: 2127523 - DNA, 15 bp, Homo sapiens
ccactttgcccattc

SEQ ID NO: 2127524 - DNA, 15 bp, Homo sapiens
cactttgcccattcc

SEQ ID NO: 2127525 - DNA, 15 bp, Homo sapiens
actttgcccattcca

SEQ ID NO: 2127526 - DNA, 15 bp, Homo sapiens
ctttgcccattccat

SEQ ID NO: 2127527 - DNA, 15 bp, Homo sapiens
tttgcccattccatc

SEQ ID NO: 2127528 - DNA, 15 bp, Homo sapiens
ttgcccattccatct

SEQ ID NO: 2127529 - DNA, 15 bp, Homo sapiens
tgcccattccatctg

SEQ ID NO: 2127530 - DNA, 15 bp, Homo sapiens
gcccattccatctga

SEQ ID NO: 2127531 - DNA, 15 bp, Homo sapiens
cccattccatctgaa

SEQ ID NO: 2127532 - DNA, 15 bp, Homo sapiens
ccattccatctgaat

SEQ ID NO: 2127533 - DNA, 15 bp, Homo sapiens
cattccatctgaata

SEQ ID NO: 2127534 - DNA, 15 bp, Homo sapiens
attccatctgaataa

SEQ ID NO: 2127535 - DNA, 15 bp, Homo sapiens
ttccatctgaataag

SEQ ID NO: 2127536 - DNA, 15 bp, Homo sapiens
tccatctgaataagg

SEQ ID NO: 2127537 - DNA, 15 bp, Homo sapiens
ccatctgaataaggt

SEQ ID NO: 2127538 - DNA, 15 bp, Homo sapiens
catctgaataaggtc

SEQ ID NO: 2127539 - DNA, 15 bp, Homo sapiens
atctgaataaggtcc

SEQ ID NO: 2127540 - DNA, 15 bp, Homo sapiens
tctgaataaggtcct

SEQ ID NO: 2127541 - DNA, 15 bp, Homo sapiens
ctgaataaggtccta

SEQ ID NO: 2127542 - DNA, 15 bp, Homo sapiens
aaggtcctactctca

SEQ ID NO: 2127543 - DNA, 15 bp, Homo sapiens
aggtcctactctcag

SEQ ID NO: 2127544 - DNA, 15 bp, Homo sapiens
ggtcctactctcaga

SEQ ID NO: 2127545 - DNA, 15 bp, Homo sapiens
gtcctactctcagac

SEQ ID NO: 2127546 - DNA, 15 bp, Homo sapiens
gatcaccaaggcccc

SEQ ID NO: 2127547 - DNA, 15 bp, Homo sapiens
atcaccaaggcccct

SEQ ID NO: 2127548 - DNA, 15 bp, Homo sapiens
tcaccaaggcccctt

SEQ ID NO: 2127549 - DNA, 15 bp, Homo sapiens
caccaaggccccttt

SEQ ID NO: 2127550 - DNA, 15 bp, Homo sapiens
accaaggcccctttt

SEQ ID NO: 2127551 - DNA, 15 bp, Homo sapiens
ccaaggccccttttc

SEQ ID NO: 2127552 - DNA, 15 bp, Homo sapiens
caaggccccttttct

SEQ ID NO: 2127553 - DNA, 15 bp, Homo sapiens
aaggccccttttctt

SEQ ID NO: 2127554 - DNA, 15 bp, Homo sapiens
aggccccttttcttg

SEQ ID NO: 2127555 - DNA, 15 bp, Homo sapiens
ggccccttttcttgg

SEQ ID NO: 2127556 - DNA, 15 bp, Homo sapiens
gccccttttcttggc

SEQ ID NO: 2127557 - DNA, 15 bp, Homo sapiens
ccccttttcttggcc

SEQ ID NO: 2127558 - DNA, 15 bp, Homo sapiens
cccttttcttggcct

SEQ ID NO: 2127559 - DNA, 15 bp, Homo sapiens
ccttttcttggcctg

SEQ ID NO: 2127560 - DNA, 15 bp, Homo sapiens
cttttcttggcctgt

SEQ ID NO: 2127561 - DNA, 15 bp, Homo sapiens
ttttcttggcctgtt

SEQ ID NO: 2127562 - DNA, 15 bp, Homo sapiens
tttcttggcctgtta

SEQ ID NO: 2127563 - DNA, 15 bp, Homo sapiens
ttcttggcctgttat

SEQ ID NO: 2127564 - DNA, 15 bp, Homo sapiens
tcttggcctgttatg

SEQ ID NO: 2127565 - DNA, 15 bp, Homo sapiens
cttggcctgttatgt

SEQ ID NO: 2127566 - DNA, 15 bp, Homo sapiens
ttggcctgttatgtg

SEQ ID NO: 2127567 - DNA, 15 bp, Homo sapiens
tggcctgttatgtgc

SEQ ID NO: 2127568 - DNA, 15 bp, Homo sapiens
ggcctgttatgtgcg

SEQ ID NO: 2127569 - DNA, 15 bp, Homo sapiens
gcctgttatgtgcgt

SEQ ID NO: 2127570 - DNA, 15 bp, Homo sapiens
cctgttatgtgcgtg

SEQ ID NO: 2127571 - DNA, 15 bp, Homo sapiens
ctgttatgtgcgtga

SEQ ID NO: 2127572 - DNA, 15 bp, Homo sapiens
tgttatgtgcgtgat

SEQ ID NO: 2127573 - DNA, 15 bp, Homo sapiens
gttatgtgcgtgatt

SEQ ID NO: 2127574 - DNA, 15 bp, Homo sapiens
ttatgtgcgtgatta

SEQ ID NO: 2127575 - DNA, 15 bp, Homo sapiens
tatgtgcgtgattat

SEQ ID NO: 2127576 - DNA, 15 bp, Homo sapiens
atgtgcgtgattata

SEQ ID NO: 2127577 - DNA, 15 bp, Homo sapiens
tgtgcgtgattatat

SEQ ID NO: 2127578 - DNA, 15 bp, Homo sapiens
gtgcgtgattatatt

SEQ ID NO: 2127579 - DNA, 15 bp, Homo sapiens
tgcgtgattatattt

SEQ ID NO: 2127580 - DNA, 15 bp, Homo sapiens
gcgtgattatatttg

SEQ ID NO: 2127581 - DNA, 15 bp, Homo sapiens
cgtgattatatttgt

SEQ ID NO: 2127582 - DNA, 15 bp, Homo sapiens
gtgattatatttgtc

SEQ ID NO: 2127583 - DNA, 15 bp, Homo sapiens
tgattatatttgtct

SEQ ID NO: 2127584 - DNA, 15 bp, Homo sapiens
gattatatttgtctg

SEQ ID NO: 2127585 - DNA, 15 bp, Homo sapiens
attatatttgtctgg

SEQ ID NO: 2127586 - DNA, 15 bp, Homo sapiens
ttatatttgtctggg

SEQ ID NO: 2127587 - DNA, 15 bp, Homo sapiens
tatatttgtctgggt

SEQ ID NO: 2127588 - DNA, 15 bp, Homo sapiens
atatttgtctgggtt

SEQ ID NO: 2127589 - DNA, 15 bp, Homo sapiens
tatttgtctgggttc

SEQ ID NO: 2127590 - DNA, 15 bp, Homo sapiens
atttgtctgggttcc

SEQ ID NO: 2127591 - DNA, 15 bp, Homo sapiens
tttgtctgggttcct

SEQ ID NO: 2127592 - DNA, 15 bp, Homo sapiens
ttgtctgggttcctg

SEQ ID NO: 2127593 - DNA, 15 bp, Homo sapiens
tgtctgggttcctgt

SEQ ID NO: 2127594 - DNA, 15 bp, Homo sapiens
gtctgggttcctgtg

SEQ ID NO: 2127595 - DNA, 15 bp, Homo sapiens
tctgggttcctgtgt

SEQ ID NO: 2127596 - DNA, 15 bp, Homo sapiens
ctgggttcctgtgta

SEQ ID NO: 2127597 - DNA, 15 bp, Homo sapiens
tgggttcctgtgtat

SEQ ID NO: 2127598 - DNA, 15 bp, Homo sapiens
gggttcctgtgtatt

SEQ ID NO: 2127599 - DNA, 15 bp, Homo sapiens
ctgtgtattagacaa

SEQ ID NO: 2127600 - DNA, 15 bp, Homo sapiens
tgtgtattagacaag

SEQ ID NO: 2127601 - DNA, 15 bp, Homo sapiens
gtgtattagacaagg

SEQ ID NO: 2127602 - DNA, 15 bp, Homo sapiens
tgtattagacaagga

SEQ ID NO: 2127603 - DNA, 15 bp, Homo sapiens
gtattagacaaggaa

SEQ ID NO: 2127604 - DNA, 15 bp, Homo sapiens
tattagacaaggaag

SEQ ID NO: 2127605 - DNA, 15 bp, Homo sapiens
attagacaaggaagc

SEQ ID NO: 2127606 - DNA, 15 bp, Homo sapiens
ttagacaaggaagcc

SEQ ID NO: 2127607 - DNA, 15 bp, Homo sapiens
tagacaaggaagcct

SEQ ID NO: 2127608 - DNA, 15 bp, Homo sapiens
agacaaggaagcctt

SEQ ID NO: 2127609 - DNA, 15 bp, Homo sapiens
gacaaggaagccttc

SEQ ID NO: 2127610 - DNA, 15 bp, Homo sapiens
acaaggaagccttcc

SEQ ID NO: 2127611 - DNA, 15 bp, Homo sapiens
caaggaagccttccc

SEQ ID NO: 2127612 - DNA, 15 bp, Homo sapiens
aaggaagccttcccc

SEQ ID NO: 2127613 - DNA, 15 bp, Homo sapiens
aggaagccttccccc

SEQ ID NO: 2127614 - DNA, 15 bp, Homo sapiens
ggaagccttcccccc

SEQ ID NO: 2127615 - DNA, 15 bp, Homo sapiens
gaagccttccccccg

SEQ ID NO: 2127616 - DNA, 15 bp, Homo sapiens
aagccttccccccgc

SEQ ID NO: 2127617 - DNA, 15 bp, Homo sapiens
agccttccccccgcc

SEQ ID NO: 2127618 - DNA, 15 bp, Homo sapiens
gccttccccccgccc

SEQ ID NO: 2127619 - DNA, 15 bp, Homo sapiens
ccttccccccgcccc

SEQ ID NO: 2127620 - DNA, 15 bp, Homo sapiens
cttccccccgccccc

SEQ ID NO: 2127621 - DNA, 15 bp, Homo sapiens
ttccccccgccccca

SEQ ID NO: 2127622 - DNA, 15 bp, Homo sapiens
cccccgcccccaccc

SEQ ID NO: 2127623 - DNA, 15 bp, Homo sapiens
ccccgcccccacccc

SEQ ID NO: 2127624 - DNA, 15 bp, Homo sapiens
cccgcccccaccccc

SEQ ID NO: 2127625 - DNA, 15 bp, Homo sapiens
ccgcccccaccccca

SEQ ID NO: 2127626 - DNA, 15 bp, Homo sapiens
cgcccccacccccac

SEQ ID NO: 2127627 - DNA, 15 bp, Homo sapiens
gcccccacccccact

SEQ ID NO: 2127628 - DNA, 15 bp, Homo sapiens
cccccacccccactc

SEQ ID NO: 2127629 - DNA, 15 bp, Homo sapiens
ccccacccccactcc

SEQ ID NO: 2127630 - DNA, 15 bp, Homo sapiens
cccacccccactccc

SEQ ID NO: 2127631 - DNA, 15 bp, Homo sapiens
ccacccccactccca

SEQ ID NO: 2127632 - DNA, 15 bp, Homo sapiens
cacccccactcccag

SEQ ID NO: 2127633 - DNA, 15 bp, Homo sapiens
acccccactcccagt

SEQ ID NO: 2127634 - DNA, 15 bp, Homo sapiens
cccccactcccagtc

SEQ ID NO: 2127635 - DNA, 15 bp, Homo sapiens
ccccactcccagtct

SEQ ID NO: 2127636 - DNA, 15 bp, Homo sapiens
cccactcccagtctt

SEQ ID NO: 2127637 - DNA, 15 bp, Homo sapiens
ccactcccagtcttc

SEQ ID NO: 2127638 - DNA, 15 bp, Homo sapiens
cactcccagtcttcc

SEQ ID NO: 2127639 - DNA, 15 bp, Homo sapiens
actcccagtcttcct

SEQ ID NO: 2127640 - DNA, 15 bp, Homo sapiens
ctcccagtcttcctt

SEQ ID NO: 2127641 - DNA, 15 bp, Homo sapiens
tcccagtcttccttt

SEQ ID NO: 2127642 - DNA, 15 bp, Homo sapiens
cccagtcttcctttc

SEQ ID NO: 2127643 - DNA, 15 bp, Homo sapiens
ccagtcttcctttcc

SEQ ID NO: 2127644 - DNA, 15 bp, Homo sapiens
cagtcttcctttccc

SEQ ID NO: 2127645 - DNA, 15 bp, Homo sapiens
agtcttcctttccct

SEQ ID NO: 2127646 - DNA, 15 bp, Homo sapiens
gtcttcctttccctt

SEQ ID NO: 2127647 - DNA, 15 bp, Homo sapiens
ttcctttcccttcca

SEQ ID NO: 2127648 - DNA, 15 bp, Homo sapiens
tcctttcccttccag

SEQ ID NO: 2127649 - DNA, 15 bp, Homo sapiens
agcagggagtgcccc

SEQ ID NO: 2127650 - DNA, 15 bp, Homo sapiens
gcagggagtgccccc

SEQ ID NO: 2127651 - DNA, 15 bp, Homo sapiens
cagggagtgccccct

SEQ ID NO: 2127652 - DNA, 15 bp, Homo sapiens
agggagtgccccctc

SEQ ID NO: 2127653 - DNA, 15 bp, Homo sapiens
gggagtgccccctcc

SEQ ID NO: 2127654 - DNA, 15 bp, Homo sapiens
ggagtgccccctcca

SEQ ID NO: 2127655 - DNA, 15 bp, Homo sapiens
gagtgccccctccat

SEQ ID NO: 2127656 - DNA, 15 bp, Homo sapiens
agtgccccctccata

SEQ ID NO: 2127657 - DNA, 15 bp, Homo sapiens
gtgccccctccataa

SEQ ID NO: 2127658 - DNA, 15 bp, Homo sapiens
tgccccctccataag

SEQ ID NO: 2127659 - DNA, 15 bp, Homo sapiens
gccccctccataaga

SEQ ID NO: 2127660 - DNA, 15 bp, Homo sapiens
ccccctccataagat

SEQ ID NO: 2127661 - DNA, 15 bp, Homo sapiens
cccctccataagatc

SEQ ID NO: 2127662 - DNA, 15 bp, Homo sapiens
ccctccataagatca

SEQ ID NO: 2127663 - DNA, 15 bp, Homo sapiens
cctccataagatcat

SEQ ID NO: 2127664 - DNA, 15 bp, Homo sapiens
ctccataagatcatt

SEQ ID NO: 2127665 - DNA, 15 bp, Homo sapiens
tccataagatcatta

SEQ ID NO: 2127666 - DNA, 15 bp, Homo sapiens
ccataagatcattac

SEQ ID NO: 2127667 - DNA, 15 bp, Homo sapiens
cataagatcattaca

SEQ ID NO: 2127668 - DNA, 15 bp, Homo sapiens
ataagatcattacat

SEQ ID NO: 2127669 - DNA, 15 bp, Homo sapiens
taagatcattacatt

SEQ ID NO: 2127670 - DNA, 15 bp, Homo sapiens
aagatcattacattt

SEQ ID NO: 2127671 - DNA, 15 bp, Homo sapiens
agatcattacatttg

SEQ ID NO: 2127672 - DNA, 15 bp, Homo sapiens
gatcattacatttgg

SEQ ID NO: 2127673 - DNA, 15 bp, Homo sapiens
atcattacatttgga

SEQ ID NO: 2127674 - DNA, 15 bp, Homo sapiens
tcattacatttggac

SEQ ID NO: 2127675 - DNA, 15 bp, Homo sapiens
cattacatttggaca

SEQ ID NO: 2127676 - DNA, 15 bp, Homo sapiens
attacatttggacaa

SEQ ID NO: 2127677 - DNA, 15 bp, Homo sapiens
ttacatttggacaat

SEQ ID NO: 2127678 - DNA, 15 bp, Homo sapiens
tacatttggacaatc

SEQ ID NO: 2127679 - DNA, 15 bp, Homo sapiens
acatttggacaatca

SEQ ID NO: 2127680 - DNA, 15 bp, Homo sapiens
catttggacaatcaa

SEQ ID NO: 2127681 - DNA, 15 bp, Homo sapiens
atttggacaatcaag

SEQ ID NO: 2127682 - DNA, 15 bp, Homo sapiens
aatcaaggtgcacaa

SEQ ID NO: 2127683 - DNA, 15 bp, Homo sapiens
atcaaggtgcacaat

SEQ ID NO: 2127684 - DNA, 15 bp, Homo sapiens
tcaaggtgcacaatt

SEQ ID NO: 2127685 - DNA, 15 bp, Homo sapiens
caaggtgcacaatta

SEQ ID NO: 2127686 - DNA, 15 bp, Homo sapiens
aaggtgcacaattat

SEQ ID NO: 2127687 - DNA, 15 bp, Homo sapiens
aggtgcacaattata

SEQ ID NO: 2127688 - DNA, 15 bp, Homo sapiens
ggtgcacaattataa

SEQ ID NO: 2127689 - DNA, 15 bp, Homo sapiens
gtgcacaattataag

SEQ ID NO: 2127690 - DNA, 15 bp, Homo sapiens
tgcacaattataagt

SEQ ID NO: 2127691 - DNA, 15 bp, Homo sapiens
gcacaattataagtg

SEQ ID NO: 2127692 - DNA, 15 bp, Homo sapiens
cacaattataagtga

SEQ ID NO: 2127693 - DNA, 15 bp, Homo sapiens
acaattataagtgac

SEQ ID NO: 2127694 - DNA, 15 bp, Homo sapiens
caattataagtgacc

SEQ ID NO: 2127695 - DNA, 15 bp, Homo sapiens
aattataagtgacca

SEQ ID NO: 2127696 - DNA, 15 bp, Homo sapiens
attataagtgaccac

SEQ ID NO: 2127697 - DNA, 15 bp, Homo sapiens
ttataagtgaccaca

SEQ ID NO: 2127698 - DNA, 15 bp, Homo sapiens
tataagtgaccacag

SEQ ID NO: 2127699 - DNA, 15 bp, Homo sapiens
ataagtgaccacagc

SEQ ID NO: 2127700 - DNA, 15 bp, Homo sapiens
taagtgaccacagcc

SEQ ID NO: 2127701 - DNA, 15 bp, Homo sapiens
aagtgaccacagcca

SEQ ID NO: 2127702 - DNA, 15 bp, Homo sapiens
agtgaccacagccat

SEQ ID NO: 2127703 - DNA, 15 bp, Homo sapiens
gtgaccacagccatg

SEQ ID NO: 2127704 - DNA, 15 bp, Homo sapiens
tgaccacagccatgc

SEQ ID NO: 2127705 - DNA, 15 bp, Homo sapiens
gaccacagccatgca

SEQ ID NO: 2127706 - DNA, 15 bp, Homo sapiens
accacagccatgcac

SEQ ID NO: 2127707 - DNA, 15 bp, Homo sapiens
ccacagccatgcacc

SEQ ID NO: 2127708 - DNA, 15 bp, Homo sapiens
cacagccatgcacct

SEQ ID NO: 2127709 - DNA, 15 bp, Homo sapiens
acagccatgcacctt

SEQ ID NO: 2127710 - DNA, 15 bp, Homo sapiens
cagccatgcaccttg

SEQ ID NO: 2127711 - DNA, 15 bp, Homo sapiens
agccatgcaccttgg

SEQ ID NO: 2127712 - DNA, 15 bp, Homo sapiens
gccatgcaccttgga

SEQ ID NO: 2127713 - DNA, 15 bp, Homo sapiens
ccatgcaccttggac

SEQ ID NO: 2127714 - DNA, 15 bp, Homo sapiens
catgcaccttggaca

SEQ ID NO: 2127715 - DNA, 15 bp, Homo sapiens
atgcaccttggacat

SEQ ID NO: 2127716 - DNA, 15 bp, Homo sapiens
tgcaccttggacatt

SEQ ID NO: 2127717 - DNA, 15 bp, Homo sapiens
gcaccttggacatta

SEQ ID NO: 2127718 - DNA, 15 bp, Homo sapiens
caccttggacattat

SEQ ID NO: 2127719 - DNA, 15 bp, Homo sapiens
accttggacattatt

SEQ ID NO: 2127720 - DNA, 15 bp, Homo sapiens
ccttggacattattg

SEQ ID NO: 2127721 - DNA, 15 bp, Homo sapiens
cttggacattattgg

SEQ ID NO: 2127722 - DNA, 15 bp, Homo sapiens
ttggacattattgga

SEQ ID NO: 2127723 - DNA, 15 bp, Homo sapiens
tggacattattggac

SEQ ID NO: 2127724 - DNA, 15 bp, Homo sapiens
ggacattattggaca

SEQ ID NO: 2127725 - DNA, 15 bp, Homo sapiens
gacattattggacat

SEQ ID NO: 2127726 - DNA, 15 bp, Homo sapiens
acattattggacatt

SEQ ID NO: 2127727 - DNA, 15 bp, Homo sapiens
cattattggacatta

SEQ ID NO: 2127728 - DNA, 15 bp, Homo sapiens
attattggacattaa

SEQ ID NO: 2127729 - DNA, 15 bp, Homo sapiens
ttattggacattaat

SEQ ID NO: 2127730 - DNA, 15 bp, Homo sapiens
tattggacattaatg

SEQ ID NO: 2127731 - DNA, 15 bp, Homo sapiens
attggacattaatgt

SEQ ID NO: 2127732 - DNA, 15 bp, Homo sapiens
ggacattaatgtgcg

SEQ ID NO: 2127733 - DNA, 15 bp, Homo sapiens
gacattaatgtgcgt

SEQ ID NO: 2127734 - DNA, 15 bp, Homo sapiens
acattaatgtgcgta

SEQ ID NO: 2127735 - DNA, 15 bp, Homo sapiens
cattaatgtgcgtaa

SEQ ID NO: 2127736 - DNA, 15 bp, Homo sapiens
attaatgtgcgtaac

SEQ ID NO: 2127737 - DNA, 15 bp, Homo sapiens
ttaatgtgcgtaact

SEQ ID NO: 2127738 - DNA, 15 bp, Homo sapiens
taatgtgcgtaactg

SEQ ID NO: 2127739 - DNA, 15 bp, Homo sapiens
aatgtgcgtaactgc

SEQ ID NO: 2127740 - DNA, 15 bp, Homo sapiens
atgtgcgtaactgca

SEQ ID NO: 2127741 - DNA, 15 bp, Homo sapiens
tgtgcgtaactgcac

SEQ ID NO: 2127742 - DNA, 15 bp, Homo sapiens
gtgcgtaactgcaca

SEQ ID NO: 2127743 - DNA, 15 bp, Homo sapiens
tgcgtaactgcacat

SEQ ID NO: 2127744 - DNA, 15 bp, Homo sapiens
gcgtaactgcacatg

SEQ ID NO: 2127745 - DNA, 15 bp, Homo sapiens
cgtaactgcacatgg

SEQ ID NO: 2127746 - DNA, 15 bp, Homo sapiens
gtaactgcacatggc

SEQ ID NO: 2127747 - DNA, 15 bp, Homo sapiens
taactgcacatggcc

SEQ ID NO: 2127748 - DNA, 15 bp, Homo sapiens
aactgcacatggccc

SEQ ID NO: 2127749 - DNA, 15 bp, Homo sapiens
actgcacatggccca

SEQ ID NO: 2127750 - DNA, 15 bp, Homo sapiens
ctgcacatggcccat

SEQ ID NO: 2127751 - DNA, 15 bp, Homo sapiens
tgcacatggcccatc

SEQ ID NO: 2127752 - DNA, 15 bp, Homo sapiens
gcacatggcccatcc

SEQ ID NO: 2127753 - DNA, 15 bp, Homo sapiens
cacatggcccatccc

SEQ ID NO: 2127754 - DNA, 15 bp, Homo sapiens
acatggcccatccca

SEQ ID NO: 2127755 - DNA, 15 bp, Homo sapiens
catggcccatcccat

SEQ ID NO: 2127756 - DNA, 15 bp, Homo sapiens
atggcccatcccatc

SEQ ID NO: 2127757 - DNA, 15 bp, Homo sapiens
tggcccatcccatct

SEQ ID NO: 2127758 - DNA, 15 bp, Homo sapiens
ggcccatcccatctg

SEQ ID NO: 2127759 - DNA, 15 bp, Homo sapiens
gcccatcccatctga

SEQ ID NO: 2127760 - DNA, 15 bp, Homo sapiens
cccatcccatctgaa

SEQ ID NO: 2127761 - DNA, 15 bp, Homo sapiens
ccatcccatctgaat

SEQ ID NO: 2127762 - DNA, 15 bp, Homo sapiens
atcccatctgaataa

SEQ ID NO: 2127763 - DNA, 15 bp, Homo sapiens
tcccatctgaataag

SEQ ID NO: 2127764 - DNA, 15 bp, Homo sapiens
cccatctgaataagg

SEQ ID NO: 2127765 - DNA, 15 bp, Homo sapiens
gtcctactctcagat

SEQ ID NO: 2127766 - DNA, 15 bp, Homo sapiens
tcctactctcagatg

SEQ ID NO: 2127767 - DNA, 15 bp, Homo sapiens
cctactctcagatgc

SEQ ID NO: 2127768 - DNA, 15 bp, Homo sapiens
ctactctcagatgcc

SEQ ID NO: 2127769 - DNA, 15 bp, Homo sapiens
tactctcagatgccc

SEQ ID NO: 2127770 - DNA, 15 bp, Homo sapiens
actctcagatgccct

SEQ ID NO: 2127771 - DNA, 15 bp, Homo sapiens
ctctcagatgccctt

SEQ ID NO: 2127772 - DNA, 15 bp, Homo sapiens
tctcagatgcccttt

SEQ ID NO: 2127773 - DNA, 15 bp, Homo sapiens
ctcagatgccctttg

SEQ ID NO: 2127774 - DNA, 15 bp, Homo sapiens
tcagatgccctttgc

SEQ ID NO: 2127775 - DNA, 15 bp, Homo sapiens
cagatgccctttgca

SEQ ID NO: 2127776 - DNA, 15 bp, Homo sapiens
agatgccctttgcag

SEQ ID NO: 2127777 - DNA, 15 bp, Homo sapiens
gatgccctttgcagt

SEQ ID NO: 2127778 - DNA, 15 bp, Homo sapiens
atgccctttgcagta

SEQ ID NO: 2127779 - DNA, 15 bp, Homo sapiens
tgccctttgcagtac

SEQ ID NO: 2127780 - DNA, 15 bp, Homo sapiens
gccctttgcagtaca

SEQ ID NO: 2127781 - DNA, 15 bp, Homo sapiens
ccctttgcagtacag

SEQ ID NO: 2127782 - DNA, 15 bp, Homo sapiens
cctttgcagtacagc

SEQ ID NO: 2127783 - DNA, 15 bp, Homo sapiens
ctttgcagtacagca

SEQ ID NO: 2127784 - DNA, 15 bp, Homo sapiens
agtacagcaggggta

SEQ ID NO: 2127785 - DNA, 15 bp, Homo sapiens
gtacagcaggggtac

SEQ ID NO: 2127786 - DNA, 15 bp, Homo sapiens
tacagcaggggtact

SEQ ID NO: 2127787 - DNA, 15 bp, Homo sapiens
acagcaggggtactg

SEQ ID NO: 2127788 - DNA, 15 bp, Homo sapiens
cagcaggggtactga

SEQ ID NO: 2127789 - DNA, 15 bp, Homo sapiens
agcaggggtactgaa

SEQ ID NO: 2127790 - DNA, 15 bp, Homo sapiens
gcaggggtactgaat

SEQ ID NO: 2127791 - DNA, 15 bp, Homo sapiens
caggggtactgaatc

SEQ ID NO: 2127792 - DNA, 15 bp, Homo sapiens
aggggtactgaatca

SEQ ID NO: 2127793 - DNA, 15 bp, Homo sapiens
ggggtactgaatcac

SEQ ID NO: 2127794 - DNA, 15 bp, Homo sapiens
gggtactgaatcacc

SEQ ID NO: 2127795 - DNA, 15 bp, Homo sapiens
ggtactgaatcacca

SEQ ID NO: 2127796 - DNA, 15 bp, Homo sapiens
gtactgaatcaccaa

SEQ ID NO: 2127797 - DNA, 15 bp, Homo sapiens
tactgaatcaccaag

SEQ ID NO: 2127798 - DNA, 15 bp, Homo sapiens
actgaatcaccaagg

SEQ ID NO: 2127799 - DNA, 15 bp, Homo sapiens
ctgaatcaccaaggc

SEQ ID NO: 2127800 - DNA, 15 bp, Homo sapiens
tgaatcaccaaggcc

SEQ ID NO: 2127801 - DNA, 15 bp, Homo sapiens
gaatcaccaaggccc

SEQ ID NO: 2127802 - DNA, 15 bp, Homo sapiens
aatcaccaaggccct

SEQ ID NO: 2127803 - DNA, 15 bp, Homo sapiens
caaggccctttttct

SEQ ID NO: 2127804 - DNA, 15 bp, Homo sapiens
aaggccctttttctt

SEQ ID NO: 2127805 - DNA, 15 bp, Homo sapiens
acaattgtaagtgag

SEQ ID NO: 2127806 - DNA, 15 bp, Homo sapiens
caattgtaagtgagc

SEQ ID NO: 2127807 - DNA, 15 bp, Homo sapiens
aattgtaagtgagca

SEQ ID NO: 2127808 - DNA, 15 bp, Homo sapiens
attgtaagtgagcat

SEQ ID NO: 2127809 - DNA, 15 bp, Homo sapiens
ttgtaagtgagcata

SEQ ID NO: 2127810 - DNA, 15 bp, Homo sapiens
tgtaagtgagcatag

SEQ ID NO: 2127811 - DNA, 15 bp, Homo sapiens
gtaagtgagcatagg

SEQ ID NO: 2127812 - DNA, 15 bp, Homo sapiens
taagtgagcataggc

SEQ ID NO: 2127813 - DNA, 15 bp, Homo sapiens
aagtgagcataggca

SEQ ID NO: 2127814 - DNA, 15 bp, Homo sapiens
agtgagcataggcac

SEQ ID NO: 2127815 - DNA, 15 bp, Homo sapiens
gtgagcataggcact

SEQ ID NO: 2127816 - DNA, 15 bp, Homo sapiens
tgagcataggcactc

SEQ ID NO: 2127817 - DNA, 15 bp, Homo sapiens
gagcataggcactca

SEQ ID NO: 2127818 - DNA, 15 bp, Homo sapiens
agcataggcactcac

SEQ ID NO: 2127819 - DNA, 15 bp, Homo sapiens
gcataggcactcacc

SEQ ID NO: 2127820 - DNA, 15 bp, Homo sapiens
cataggcactcacct

SEQ ID NO: 2127821 - DNA, 15 bp, Homo sapiens
ataggcactcacctt

SEQ ID NO: 2127822 - DNA, 15 bp, Homo sapiens
taggcactcaccttg

SEQ ID NO: 2127823 - DNA, 15 bp, Homo sapiens
aggcactcaccttgg

SEQ ID NO: 2127824 - DNA, 15 bp, Homo sapiens
ggcactcaccttgga

SEQ ID NO: 2127825 - DNA, 15 bp, Homo sapiens
gcactcaccttggac

SEQ ID NO: 2127826 - DNA, 15 bp, Homo sapiens
cactcaccttggaca

SEQ ID NO: 2127827 - DNA, 15 bp, Homo sapiens
actcaccttggacat

SEQ ID NO: 2127828 - DNA, 15 bp, Homo sapiens
ctcaccttggacatg

SEQ ID NO: 2127829 - DNA, 15 bp, Homo sapiens
tcaccttggacatga

SEQ ID NO: 2127830 - DNA, 15 bp, Homo sapiens
caccttggacatgaa

SEQ ID NO: 2127831 - DNA, 15 bp, Homo sapiens
accttggacatgaat

SEQ ID NO: 2127832 - DNA, 15 bp, Homo sapiens
ccttggacatgaatg

SEQ ID NO: 2127833 - DNA, 15 bp, Homo sapiens
cttggacatgaatgt

SEQ ID NO: 2127834 - DNA, 15 bp, Homo sapiens
ttggacatgaatgtg

SEQ ID NO: 2127835 - DNA, 15 bp, Homo sapiens
tggacatgaatgtgc

SEQ ID NO: 2127836 - DNA, 15 bp, Homo sapiens
ggacatgaatgtgca

SEQ ID NO: 2127837 - DNA, 15 bp, Homo sapiens
gacatgaatgtgcat

SEQ ID NO: 2127838 - DNA, 15 bp, Homo sapiens
acatgaatgtgcata

SEQ ID NO: 2127839 - DNA, 15 bp, Homo sapiens
catgaatgtgcataa

SEQ ID NO: 2127840 - DNA, 15 bp, Homo sapiens
atgaatgtgcataac

SEQ ID NO: 2127841 - DNA, 15 bp, Homo sapiens
tgaatgtgcataact

SEQ ID NO: 2127842 - DNA, 15 bp, Homo sapiens
gaatgtgcataactg

SEQ ID NO: 2127843 - DNA, 15 bp, Homo sapiens
aatgtgcataactgc

SEQ ID NO: 2127844 - DNA, 15 bp, Homo sapiens
atgtgcataactgca

SEQ ID NO: 2127845 - DNA, 15 bp, Homo sapiens
tgtgcataactgcac

SEQ ID NO: 2127846 - DNA, 15 bp, Homo sapiens
gtgcataactgcaca

SEQ ID NO: 2127847 - DNA, 15 bp, Homo sapiens
tgcataactgcacat

SEQ ID NO: 2127848 - DNA, 15 bp, Homo sapiens
gcataactgcacatg

SEQ ID NO: 2127849 - DNA, 15 bp, Homo sapiens
cataactgcacatgg

SEQ ID NO: 2127850 - DNA, 15 bp, Homo sapiens
ataactgcacatggc

SEQ ID NO: 2127851 - DNA, 15 bp, Homo sapiens
ctactctcagaccct

SEQ ID NO: 2127852 - DNA, 15 bp, Homo sapiens
tactctcagaccctt

SEQ ID NO: 2127853 - DNA, 15 bp, Homo sapiens
actctcagacccttt

SEQ ID NO: 2127854 - DNA, 15 bp, Homo sapiens
ctctcagaccctttt

SEQ ID NO: 2127855 - DNA, 15 bp, Homo sapiens
tctcagacccttttt

SEQ ID NO: 2127856 - DNA, 15 bp, Homo sapiens
ctcagaccctttttg

SEQ ID NO: 2127857 - DNA, 15 bp, Homo sapiens
tcagaccctttttgc

SEQ ID NO: 2127858 - DNA, 15 bp, Homo sapiens
cagaccctttttgca

SEQ ID NO: 2127859 - DNA, 15 bp, Homo sapiens
agaccctttttgcag

SEQ ID NO: 2127860 - DNA, 15 bp, Homo sapiens
gaccctttttgcagt

SEQ ID NO: 2127861 - DNA, 15 bp, Homo sapiens
accctttttgcagta

SEQ ID NO: 2127862 - DNA, 15 bp, Homo sapiens
ccctttttgcagtac

SEQ ID NO: 2127863 - DNA, 15 bp, Homo sapiens
cctttttgcagtaca

SEQ ID NO: 2127864 - DNA, 15 bp, Homo sapiens
ctttttgcagtacag

SEQ ID NO: 2127865 - DNA, 15 bp, Homo sapiens
tttttgcagtacagc

SEQ ID NO: 2127866 - DNA, 15 bp, Homo sapiens
caaggccccttttcc

SEQ ID NO: 2127867 - DNA, 15 bp, Homo sapiens
aaggccccttttcct

SEQ ID NO: 2127868 - DNA, 15 bp, Homo sapiens
aggccccttttcctg

SEQ ID NO: 2127869 - DNA, 15 bp, Homo sapiens
ggccccttttcctgg

SEQ ID NO: 2127870 - DNA, 15 bp, Homo sapiens
gccccttttcctggc

SEQ ID NO: 2127871 - DNA, 15 bp, Homo sapiens
ccccttttcctggcc

SEQ ID NO: 2127872 - DNA, 15 bp, Homo sapiens
cccttttcctggcct

SEQ ID NO: 2127873 - DNA, 15 bp, Homo sapiens
ccttttcctggcctg

SEQ ID NO: 2127874 - DNA, 15 bp, Homo sapiens
cttttcctggcctgt

SEQ ID NO: 2127875 - DNA, 15 bp, Homo sapiens
ttttcctggcctgtt

SEQ ID NO: 2127876 - DNA, 15 bp, Homo sapiens
tttcctggcctgtta

SEQ ID NO: 2127877 - DNA, 15 bp, Homo sapiens
ttcctggcctgttat

SEQ ID NO: 2127878 - DNA, 15 bp, Homo sapiens
tcctggcctgttatg

SEQ ID NO: 2127879 - DNA, 15 bp, Homo sapiens
cctggcctgttatgt

SEQ ID NO: 2127880 - DNA, 15 bp, Homo sapiens
ctggcctgttatgtg

SEQ ID NO: 2127881 - DNA, 15 bp, Homo sapiens
gtgtgattatatttg

SEQ ID NO: 2127882 - DNA, 15 bp, Homo sapiens
tgtgattatatttgt

SEQ ID NO: 2127883 - DNA, 15 bp, Homo sapiens
gtgattatatttgtt

SEQ ID NO: 2127884 - DNA, 15 bp, Homo sapiens
tgattatatttgttc

SEQ ID NO: 2127885 - DNA, 15 bp, Homo sapiens
gattatatttgttcc

SEQ ID NO: 2127886 - DNA, 15 bp, Homo sapiens
attatatttgttcca

SEQ ID NO: 2127887 - DNA, 15 bp, Homo sapiens
ttatatttgttccag

SEQ ID NO: 2127888 - DNA, 15 bp, Homo sapiens
tatatttgttccagt

SEQ ID NO: 2127889 - DNA, 15 bp, Homo sapiens
atatttgttccagtt

SEQ ID NO: 2127890 - DNA, 15 bp, Homo sapiens
tatttgttccagttc

SEQ ID NO: 2127891 - DNA, 15 bp, Homo sapiens
atttgttccagttcc

SEQ ID NO: 2127892 - DNA, 15 bp, Homo sapiens
tttgttccagttcct

SEQ ID NO: 2127893 - DNA, 15 bp, Homo sapiens
ttgttccagttcctg

SEQ ID NO: 2127894 - DNA, 15 bp, Homo sapiens
tgttccagttcctgt

SEQ ID NO: 2127895 - DNA, 15 bp, Homo sapiens
gttccagttcctgtg

SEQ ID NO: 2127896 - DNA, 15 bp, Homo sapiens
ttccagttcctgtgt

SEQ ID NO: 2127897 - DNA, 15 bp, Homo sapiens
tccagttcctgtgta

SEQ ID NO: 2127898 - DNA, 15 bp, Homo sapiens
ccagttcctgtgtaa

SEQ ID NO: 2127899 - DNA, 15 bp, Homo sapiens
cagttcctgtgtaat

SEQ ID NO: 2127900 - DNA, 15 bp, Homo sapiens
agttcctgtgtaata

SEQ ID NO: 2127901 - DNA, 15 bp, Homo sapiens
gttcctgtgtaatag

SEQ ID NO: 2127902 - DNA, 15 bp, Homo sapiens
ttcctgtgtaataga

SEQ ID NO: 2127903 - DNA, 15 bp, Homo sapiens
tcctgtgtaatagac

SEQ ID NO: 2127904 - DNA, 15 bp, Homo sapiens
cctgtgtaatagaca

SEQ ID NO: 2127905 - DNA, 15 bp, Homo sapiens
gtgtaatagacatgg

SEQ ID NO: 2127906 - DNA, 15 bp, Homo sapiens
tgtaatagacatgga

SEQ ID NO: 2127907 - DNA, 15 bp, Homo sapiens
gtaatagacatggaa

SEQ ID NO: 2127908 - DNA, 15 bp, Homo sapiens
taatagacatggaag

SEQ ID NO: 2127909 - DNA, 15 bp, Homo sapiens
aatagacatggaagc

SEQ ID NO: 2127910 - DNA, 15 bp, Homo sapiens
atagacatggaagcc

SEQ ID NO: 2127911 - DNA, 15 bp, Homo sapiens
cttcctttcccttct

SEQ ID NO: 2127912 - DNA, 15 bp, Homo sapiens
ttcctttcccttctg

SEQ ID NO: 2127913 - DNA, 15 bp, Homo sapiens
tcctttcccttctgg

SEQ ID NO: 2127914 - DNA, 15 bp, Homo sapiens
cctttcccttctggc

SEQ ID NO: 2127915 - DNA, 15 bp, Homo sapiens
ctttcccttctggca

SEQ ID NO: 2127916 - DNA, 15 bp, Homo sapiens
tttcccttctggcag

SEQ ID NO: 2127917 - DNA, 15 bp, Homo sapiens
ttcccttctggcagg

SEQ ID NO: 2127918 - DNA, 15 bp, Homo sapiens
tcccttctggcagga

SEQ ID NO: 2127919 - DNA, 15 bp, Homo sapiens
cccttctggcaggaa

SEQ ID NO: 2127920 - DNA, 15 bp, Homo sapiens
ccttctggcaggaag

SEQ ID NO: 2127921 - DNA, 15 bp, Homo sapiens
cttctggcaggaagt

SEQ ID NO: 2127922 - DNA, 15 bp, Homo sapiens
ttctggcaggaagta

SEQ ID NO: 2127923 - DNA, 15 bp, Homo sapiens
tctggcaggaagtac

SEQ ID NO: 2127924 - DNA, 15 bp, Homo sapiens
ctggcaggaagtacc

SEQ ID NO: 2127925 - DNA, 15 bp, Homo sapiens
tggcaggaagtaccc

SEQ ID NO: 2127926 - DNA, 15 bp, Homo sapiens
ggcaggaagtacccg

SEQ ID NO: 2127927 - DNA, 15 bp, Homo sapiens
gcaggaagtacccgc

SEQ ID NO: 2127928 - DNA, 15 bp, Homo sapiens
caggaagtacccgct

SEQ ID NO: 2127929 - DNA, 15 bp, Homo sapiens
aggaagtacccgctc

SEQ ID NO: 2127930 - DNA, 15 bp, Homo sapiens
ggaagtacccgctcc

SEQ ID NO: 2127931 - DNA, 15 bp, Homo sapiens
gaagtacccgctcca

SEQ ID NO: 2127932 - DNA, 15 bp, Homo sapiens
aagtacccgctccat

SEQ ID NO: 2127933 - DNA, 15 bp, Homo sapiens
agtacccgctccata

SEQ ID NO: 2127934 - DNA, 15 bp, Homo sapiens
gtacccgctccataa

SEQ ID NO: 2127935 - DNA, 15 bp, Homo sapiens
tacccgctccataag

SEQ ID NO: 2127936 - DNA, 15 bp, Homo sapiens
acccgctccataaga

SEQ ID NO: 2127937 - DNA, 15 bp, Homo sapiens
cccgctccataagac

SEQ ID NO: 2127938 - DNA, 15 bp, Homo sapiens
ccgctccataagacc

SEQ ID NO: 2127939 - DNA, 15 bp, Homo sapiens
cgctccataagaccc

SEQ ID NO: 2127940 - DNA, 15 bp, Homo sapiens
gctccataagaccct

SEQ ID NO: 2127941 - DNA, 15 bp, Homo sapiens
ctccataagaccctt

SEQ ID NO: 2127942 - DNA, 15 bp, Homo sapiens
tccataagaccctta

SEQ ID NO: 2127943 - DNA, 15 bp, Homo sapiens
ccataagacccttac

SEQ ID NO: 2127944 - DNA, 15 bp, Homo sapiens
cataagacccttaca

SEQ ID NO: 2127945 - DNA, 15 bp, Homo sapiens
ataagacccttacat

SEQ ID NO: 2127946 - DNA, 15 bp, Homo sapiens
taagacccttacatt

SEQ ID NO: 2127947 - DNA, 15 bp, Homo sapiens
aagacccttacattt

SEQ ID NO: 2127948 - DNA, 15 bp, Homo sapiens
agacccttacatttg

SEQ ID NO: 2127949 - DNA, 15 bp, Homo sapiens
gacccttacatttgg

SEQ ID NO: 2127950 - DNA, 15 bp, Homo sapiens
cttacatttggacag

SEQ ID NO: 2127951 - DNA, 15 bp, Homo sapiens
ttacatttggacagt

SEQ ID NO: 2127952 - DNA, 15 bp, Homo sapiens
tacatttggacagtc

SEQ ID NO: 2127953 - DNA, 15 bp, Homo sapiens
gacagtcaaggtgca

SEQ ID NO: 2127954 - DNA, 15 bp, Homo sapiens
acagtcaaggtgcac

SEQ ID NO: 2127955 - DNA, 15 bp, Homo sapiens
cagtcaaggtgcaca

SEQ ID NO: 2127956 - DNA, 15 bp, Homo sapiens
agtcaaggtgcacaa

SEQ ID NO: 2127957 - DNA, 15 bp, Homo sapiens
gtcaaggtgcacaat

SEQ ID NO: 2127958 - DNA, 15 bp, Homo sapiens
ggtgcacaattgtat

SEQ ID NO: 2127959 - DNA, 15 bp, Homo sapiens
gtgcacaattgtatg

SEQ ID NO: 2127960 - DNA, 15 bp, Homo sapiens
tgcacaattgtatgt

SEQ ID NO: 2127961 - DNA, 15 bp, Homo sapiens
gcacaattgtatgtg

SEQ ID NO: 2127962 - DNA, 15 bp, Homo sapiens
cacaattgtatgtga

SEQ ID NO: 2127963 - DNA, 15 bp, Homo sapiens
acaattgtatgtgac

SEQ ID NO: 2127964 - DNA, 15 bp, Homo sapiens
caattgtatgtgacc

SEQ ID NO: 2127965 - DNA, 15 bp, Homo sapiens
aattgtatgtgacca

SEQ ID NO: 2127966 - DNA, 15 bp, Homo sapiens
attgtatgtgaccac

SEQ ID NO: 2127967 - DNA, 15 bp, Homo sapiens
ttgtatgtgaccaca

SEQ ID NO: 2127968 - DNA, 15 bp, Homo sapiens
tgtatgtgaccacaa

SEQ ID NO: 2127969 - DNA, 15 bp, Homo sapiens
gtatgtgaccacaac

SEQ ID NO: 2127970 - DNA, 15 bp, Homo sapiens
tatgtgaccacaacc

SEQ ID NO: 2127971 - DNA, 15 bp, Homo sapiens
atgtgaccacaacca

SEQ ID NO: 2127972 - DNA, 15 bp, Homo sapiens
tgtgaccacaaccat

SEQ ID NO: 2127973 - DNA, 15 bp, Homo sapiens
gtgaccacaaccatg

SEQ ID NO: 2127974 - DNA, 15 bp, Homo sapiens
tgaccacaaccatgc

SEQ ID NO: 2127975 - DNA, 15 bp, Homo sapiens
gaccacaaccatgca

SEQ ID NO: 2127976 - DNA, 15 bp, Homo sapiens
accacaaccatgcac

SEQ ID NO: 2127977 - DNA, 15 bp, Homo sapiens
ccacaaccatgcacc

SEQ ID NO: 2127978 - DNA, 15 bp, Homo sapiens
caaccatgcaccttg

SEQ ID NO: 2127979 - DNA, 15 bp, Homo sapiens
aaccatgcaccttgg

SEQ ID NO: 2127980 - DNA, 15 bp, Homo sapiens
accatgcaccttgga

SEQ ID NO: 2127981 - DNA, 15 bp, Homo sapiens
tgcaccttggacata

SEQ ID NO: 2127982 - DNA, 15 bp, Homo sapiens
gcaccttggacataa

SEQ ID NO: 2127983 - DNA, 15 bp, Homo sapiens
caccttggacataaa

SEQ ID NO: 2127984 - DNA, 15 bp, Homo sapiens
accttggacataaat

SEQ ID NO: 2127985 - DNA, 15 bp, Homo sapiens
ccttggacataaatg

SEQ ID NO: 2127986 - DNA, 15 bp, Homo sapiens
cttggacataaatgt

SEQ ID NO: 2127987 - DNA, 15 bp, Homo sapiens
ttggacataaatgtg

SEQ ID NO: 2127988 - DNA, 15 bp, Homo sapiens
tggacataaatgtgt

SEQ ID NO: 2127989 - DNA, 15 bp, Homo sapiens
ggacataaatgtgtg

SEQ ID NO: 2127990 - DNA, 15 bp, Homo sapiens
gacataaatgtgtgt

SEQ ID NO: 2127991 - DNA, 15 bp, Homo sapiens
acataaatgtgtgta

SEQ ID NO: 2127992 - DNA, 15 bp, Homo sapiens
cataaatgtgtgtaa

SEQ ID NO: 2127993 - DNA, 15 bp, Homo sapiens
ataaatgtgtgtaac

SEQ ID NO: 2127994 - DNA, 15 bp, Homo sapiens
taaatgtgtgtaact

SEQ ID NO: 2127995 - DNA, 15 bp, Homo sapiens
aaatgtgtgtaactg

SEQ ID NO: 2127996 - DNA, 15 bp, Homo sapiens
aatgtgtgtaactgc

SEQ ID NO: 2127997 - DNA, 15 bp, Homo sapiens
atgtgtgtaactgca

SEQ ID NO: 2127998 - DNA, 15 bp, Homo sapiens
tgtgtgtaactgcac

SEQ ID NO: 2127999 - DNA, 15 bp, Homo sapiens
gtgtgtaactgcaca

SEQ ID NO: 2128000 - DNA, 15 bp, Homo sapiens
tgtgtaactgcacat

SEQ ID NO: 2128001 - DNA, 15 bp, Homo sapiens
gtgtaactgcacatg

SEQ ID NO: 2128002 - DNA, 15 bp, Homo sapiens
tgtaactgcacatgg

SEQ ID NO: 2128003 - DNA, 15 bp, Homo sapiens
cttttgcagtacagt

SEQ ID NO: 2128004 - DNA, 15 bp, Homo sapiens
ttttgcagtacagta

SEQ ID NO: 2128005 - DNA, 15 bp, Homo sapiens
tttgcagtacagtag

SEQ ID NO: 2128006 - DNA, 15 bp, Homo sapiens
ttgcagtacagtagg

SEQ ID NO: 2128007 - DNA, 15 bp, Homo sapiens
tgcagtacagtaggt

SEQ ID NO: 2128008 - DNA, 15 bp, Homo sapiens
gcagtacagtaggtg

SEQ ID NO: 2128009 - DNA, 15 bp, Homo sapiens
cagtacagtaggtgt

SEQ ID NO: 2128010 - DNA, 15 bp, Homo sapiens
agtacagtaggtgtg

SEQ ID NO: 2128011 - DNA, 15 bp, Homo sapiens
gtacagtaggtgtgc

SEQ ID NO: 2128012 - DNA, 15 bp, Homo sapiens
tacagtaggtgtgct

SEQ ID NO: 2128013 - DNA, 15 bp, Homo sapiens
acagtaggtgtgctg

SEQ ID NO: 2128014 - DNA, 15 bp, Homo sapiens
cagtaggtgtgctga

SEQ ID NO: 2128015 - DNA, 15 bp, Homo sapiens
agtaggtgtgctgat

SEQ ID NO: 2128016 - DNA, 15 bp, Homo sapiens
gtaggtgtgctgata

SEQ ID NO: 2128017 - DNA, 15 bp, Homo sapiens
taggtgtgctgataa

SEQ ID NO: 2128018 - DNA, 15 bp, Homo sapiens
aggtgtgctgataac

SEQ ID NO: 2128019 - DNA, 15 bp, Homo sapiens
ggtgtgctgataacc

SEQ ID NO: 2128020 - DNA, 15 bp, Homo sapiens
gtgtgctgataacca

SEQ ID NO: 2128021 - DNA, 15 bp, Homo sapiens
tgtgctgataaccaa

SEQ ID NO: 2128022 - DNA, 15 bp, Homo sapiens
gtgctgataaccaag

SEQ ID NO: 2128023 - DNA, 15 bp, Homo sapiens
tgctgataaccaagg

SEQ ID NO: 2128024 - DNA, 15 bp, Homo sapiens
gctgataaccaaggc

SEQ ID NO: 2128025 - DNA, 15 bp, Homo sapiens
ctgataaccaaggcc

SEQ ID NO: 2128026 - DNA, 15 bp, Homo sapiens
tgataaccaaggccc

SEQ ID NO: 2128027 - DNA, 15 bp, Homo sapiens
gataaccaaggcccc

SEQ ID NO: 2128028 - DNA, 15 bp, Homo sapiens
ataaccaaggcccct

SEQ ID NO: 2128029 - DNA, 15 bp, Homo sapiens
taaccaaggcccctc

SEQ ID NO: 2128030 - DNA, 15 bp, Homo sapiens
aaccaaggcccctct

SEQ ID NO: 2128031 - DNA, 15 bp, Homo sapiens
accaaggcccctctt

SEQ ID NO: 2128032 - DNA, 15 bp, Homo sapiens
ccaaggcccctcttc

SEQ ID NO: 2128033 - DNA, 15 bp, Homo sapiens
caaggcccctcttcc

SEQ ID NO: 2128034 - DNA, 15 bp, Homo sapiens
aaggcccctcttcct

SEQ ID NO: 2128035 - DNA, 15 bp, Homo sapiens
aggcccctcttcctg

SEQ ID NO: 2128036 - DNA, 15 bp, Homo sapiens
ggcccctcttcctgg

SEQ ID NO: 2128037 - DNA, 15 bp, Homo sapiens
gcccctcttcctggc

SEQ ID NO: 2128038 - DNA, 15 bp, Homo sapiens
cccctcttcctggcc

SEQ ID NO: 2128039 - DNA, 15 bp, Homo sapiens
ccctcttcctggcct

SEQ ID NO: 2128040 - DNA, 15 bp, Homo sapiens
cctcttcctggcctg

SEQ ID NO: 2128041 - DNA, 15 bp, Homo sapiens
ctcttcctggcctgt

SEQ ID NO: 2128042 - DNA, 15 bp, Homo sapiens
tcttcctggcctgtt

SEQ ID NO: 2128043 - DNA, 15 bp, Homo sapiens
cttcctggcctgtta

SEQ ID NO: 2128044 - DNA, 15 bp, Homo sapiens
ttcctggcctgttaa

SEQ ID NO: 2128045 - DNA, 15 bp, Homo sapiens
tcctggcctgttaac

SEQ ID NO: 2128046 - DNA, 15 bp, Homo sapiens
cctggcctgttaacg

SEQ ID NO: 2128047 - DNA, 15 bp, Homo sapiens
ctggcctgttaacgt

SEQ ID NO: 2128048 - DNA, 15 bp, Homo sapiens
tggcctgttaacgta

SEQ ID NO: 2128049 - DNA, 15 bp, Homo sapiens
ggcctgttaacgtat

SEQ ID NO: 2128050 - DNA, 15 bp, Homo sapiens
gcctgttaacgtatg

SEQ ID NO: 2128051 - DNA, 15 bp, Homo sapiens
cctgttaacgtatgt

SEQ ID NO: 2128052 - DNA, 15 bp, Homo sapiens
ctgttaacgtatgtg

SEQ ID NO: 2128053 - DNA, 15 bp, Homo sapiens
tgttaacgtatgtga

SEQ ID NO: 2128054 - DNA, 15 bp, Homo sapiens
gttaacgtatgtgat

SEQ ID NO: 2128055 - DNA, 15 bp, Homo sapiens
ttaacgtatgtgatt

SEQ ID NO: 2128056 - DNA, 15 bp, Homo sapiens
taacgtatgtgatta

SEQ ID NO: 2128057 - DNA, 15 bp, Homo sapiens
aacgtatgtgattat

SEQ ID NO: 2128058 - DNA, 15 bp, Homo sapiens
acgtatgtgattata

SEQ ID NO: 2128059 - DNA, 15 bp, Homo sapiens
cgtatgtgattatat

SEQ ID NO: 2128060 - DNA, 15 bp, Homo sapiens
gtatgtgattatatt

SEQ ID NO: 2128061 - DNA, 15 bp, Homo sapiens
tatgtgattatattt

SEQ ID NO: 2128062 - DNA, 15 bp, Homo sapiens
atgtgattatatttg

SEQ ID NO: 2128063 - DNA, 15 bp, Homo sapiens
tttgtctgggttcca

SEQ ID NO: 2128064 - DNA, 15 bp, Homo sapiens
ttgtctgggttccag

SEQ ID NO: 2128065 - DNA, 15 bp, Homo sapiens
tgtctgggttccagt

SEQ ID NO: 2128066 - DNA, 15 bp, Homo sapiens
gtctgggttccagtg

SEQ ID NO: 2128067 - DNA, 15 bp, Homo sapiens
tctgggttccagtgt

SEQ ID NO: 2128068 - DNA, 15 bp, Homo sapiens
ctgggttccagtgta

SEQ ID NO: 2128069 - DNA, 15 bp, Homo sapiens
tgggttccagtgtat

SEQ ID NO: 2128070 - DNA, 15 bp, Homo sapiens
gggttccagtgtata

SEQ ID NO: 2128071 - DNA, 15 bp, Homo sapiens
ggttccagtgtataa

SEQ ID NO: 2128072 - DNA, 15 bp, Homo sapiens
gttccagtgtataag

SEQ ID NO: 2128073 - DNA, 15 bp, Homo sapiens
ttccagtgtataaga

SEQ ID NO: 2128074 - DNA, 15 bp, Homo sapiens
tccagtgtataagac

SEQ ID NO: 2128075 - DNA, 15 bp, Homo sapiens
ccagtgtataagaca

SEQ ID NO: 2128076 - DNA, 15 bp, Homo sapiens
cagtgtataagacat

SEQ ID NO: 2128077 - DNA, 15 bp, Homo sapiens
agtgtataagacatg

SEQ ID NO: 2128078 - DNA, 15 bp, Homo sapiens
gtgtataagacatgg

SEQ ID NO: 2128079 - DNA, 15 bp, Homo sapiens
tgtataagacatgga

SEQ ID NO: 2128080 - DNA, 15 bp, Homo sapiens
gtataagacatggaa

SEQ ID NO: 2128081 - DNA, 15 bp, Homo sapiens
tataagacatggaag

SEQ ID NO: 2128082 - DNA, 15 bp, Homo sapiens
ataagacatggaagc

SEQ ID NO: 2128083 - DNA, 15 bp, Homo sapiens
taagacatggaagcc

SEQ ID NO: 2128084 - DNA, 15 bp, Homo sapiens
aagacatggaagcct

SEQ ID NO: 2128085 - DNA, 15 bp, Homo sapiens
aagcctcccctgccc

SEQ ID NO: 2128086 - DNA, 15 bp, Homo sapiens
agcctcccctgcccc

SEQ ID NO: 2128087 - DNA, 15 bp, Homo sapiens
gcctcccctgcccca

SEQ ID NO: 2128088 - DNA, 15 bp, Homo sapiens
cctcccctgccccac

SEQ ID NO: 2128089 - DNA, 15 bp, Homo sapiens
ctcccctgccccacc

SEQ ID NO: 2128090 - DNA, 15 bp, Homo sapiens
tcccctgccccaccc

SEQ ID NO: 2128091 - DNA, 15 bp, Homo sapiens
cccctgccccacccc

SEQ ID NO: 2128092 - DNA, 15 bp, Homo sapiens
ccctgccccacccca

SEQ ID NO: 2128093 - DNA, 15 bp, Homo sapiens
cctgccccaccccac

SEQ ID NO: 2128094 - DNA, 15 bp, Homo sapiens
ctgccccaccccacc

SEQ ID NO: 2128095 - DNA, 15 bp, Homo sapiens
tgccccaccccaccc

SEQ ID NO: 2128096 - DNA, 15 bp, Homo sapiens
gccccaccccaccct

SEQ ID NO: 2128097 - DNA, 15 bp, Homo sapiens
ccccaccccaccctc

SEQ ID NO: 2128098 - DNA, 15 bp, Homo sapiens
cccaccccaccctca

SEQ ID NO: 2128099 - DNA, 15 bp, Homo sapiens
ccaccccaccctcaa

SEQ ID NO: 2128100 - DNA, 15 bp, Homo sapiens
caccccaccctcaat

SEQ ID NO: 2128101 - DNA, 15 bp, Homo sapiens
accccaccctcaatc

SEQ ID NO: 2128102 - DNA, 15 bp, Homo sapiens
ccccaccctcaatct

SEQ ID NO: 2128103 - DNA, 15 bp, Homo sapiens
cccaccctcaatctt

SEQ ID NO: 2128104 - DNA, 15 bp, Homo sapiens
ccaccctcaatcttc

SEQ ID NO: 2128105 - DNA, 15 bp, Homo sapiens
caccctcaatcttcc

SEQ ID NO: 2128106 - DNA, 15 bp, Homo sapiens
accctcaatcttcct

SEQ ID NO: 2128107 - DNA, 15 bp, Homo sapiens
ccctcaatcttcctt

SEQ ID NO: 2128108 - DNA, 15 bp, Homo sapiens
cctcaatcttccttt

SEQ ID NO: 2128109 - DNA, 15 bp, Homo sapiens
ctcaatcttcctttc

SEQ ID NO: 2128110 - DNA, 15 bp, Homo sapiens
tcaatcttcctttcc

SEQ ID NO: 2128111 - DNA, 15 bp, Homo sapiens
tcccttctggcaggg

SEQ ID NO: 2128112 - DNA, 15 bp, Homo sapiens
cccttctggcaggga

SEQ ID NO: 2128113 - DNA, 15 bp, Homo sapiens
ccttctggcagggag

SEQ ID NO: 2128114 - DNA, 15 bp, Homo sapiens
cttctggcagggagt

SEQ ID NO: 2128115 - DNA, 15 bp, Homo sapiens
ttctggcagggagtg

SEQ ID NO: 2128116 - DNA, 15 bp, Homo sapiens
tctggcagggagtgc

SEQ ID NO: 2128117 - DNA, 15 bp, Homo sapiens
ctggcagggagtgcc

SEQ ID NO: 2128118 - DNA, 15 bp, Homo sapiens
tggcagggagtgcca

SEQ ID NO: 2128119 - DNA, 15 bp, Homo sapiens
ggcagggagtgccag

SEQ ID NO: 2128120 - DNA, 15 bp, Homo sapiens
gcagggagtgccagc

SEQ ID NO: 2128121 - DNA, 15 bp, Homo sapiens
cagggagtgccagct

SEQ ID NO: 2128122 - DNA, 15 bp, Homo sapiens
agggagtgccagctc

SEQ ID NO: 2128123 - DNA, 15 bp, Homo sapiens
gggagtgccagctcc

SEQ ID NO: 2128124 - DNA, 15 bp, Homo sapiens
ggagtgccagctcca

SEQ ID NO: 2128125 - DNA, 15 bp, Homo sapiens
gagtgccagctccat

SEQ ID NO: 2128126 - DNA, 15 bp, Homo sapiens
agtgccagctccata

SEQ ID NO: 2128127 - DNA, 15 bp, Homo sapiens
gtgccagctccataa

SEQ ID NO: 2128128 - DNA, 15 bp, Homo sapiens
tgccagctccataag

SEQ ID NO: 2128129 - DNA, 15 bp, Homo sapiens
gccagctccataaga

SEQ ID NO: 2128130 - DNA, 15 bp, Homo sapiens
ccagctccataagaa

SEQ ID NO: 2128131 - DNA, 15 bp, Homo sapiens
cagctccataagaac

SEQ ID NO: 2128132 - DNA, 15 bp, Homo sapiens
agctccataagaacc

SEQ ID NO: 2128133 - DNA, 15 bp, Homo sapiens
gctccataagaacct

SEQ ID NO: 2128134 - DNA, 15 bp, Homo sapiens
ctccataagaacctt

SEQ ID NO: 2128135 - DNA, 15 bp, Homo sapiens
tccataagaacctta

SEQ ID NO: 2128136 - DNA, 15 bp, Homo sapiens
ccataagaaccttac

SEQ ID NO: 2128137 - DNA, 15 bp, Homo sapiens
cataagaaccttaca

SEQ ID NO: 2128138 - DNA, 15 bp, Homo sapiens
ataagaaccttacat

SEQ ID NO: 2128139 - DNA, 15 bp, Homo sapiens
taagaaccttacatt

SEQ ID NO: 2128140 - DNA, 15 bp, Homo sapiens
aagaaccttacattt

SEQ ID NO: 2128141 - DNA, 15 bp, Homo sapiens
agaaccttacatttg

SEQ ID NO: 2128142 - DNA, 15 bp, Homo sapiens
gaaccttacatttgg

SEQ ID NO: 2128143 - DNA, 15 bp, Homo sapiens
aaccttacatttgga

SEQ ID NO: 2128144 - DNA, 15 bp, Homo sapiens
accttacatttggac

SEQ ID NO: 2128145 - DNA, 15 bp, Homo sapiens
caaggtgcacaattc

SEQ ID NO: 2128146 - DNA, 15 bp, Homo sapiens
aaggtgcacaattct

SEQ ID NO: 2128147 - DNA, 15 bp, Homo sapiens
aggtgcacaattcta

SEQ ID NO: 2128148 - DNA, 15 bp, Homo sapiens
ggtgcacaattctaa

SEQ ID NO: 2128149 - DNA, 15 bp, Homo sapiens
gtgcacaattctaag

SEQ ID NO: 2128150 - DNA, 15 bp, Homo sapiens
tgcacaattctaagt

SEQ ID NO: 2128151 - DNA, 15 bp, Homo sapiens
gcacaattctaagtg

SEQ ID NO: 2128152 - DNA, 15 bp, Homo sapiens
cacaattctaagtga

SEQ ID NO: 2128153 - DNA, 15 bp, Homo sapiens
acaattctaagtgac

SEQ ID NO: 2128154 - DNA, 15 bp, Homo sapiens
caattctaagtgacc

SEQ ID NO: 2128155 - DNA, 15 bp, Homo sapiens
aattctaagtgaccg

SEQ ID NO: 2128156 - DNA, 15 bp, Homo sapiens
attctaagtgaccgc

SEQ ID NO: 2128157 - DNA, 15 bp, Homo sapiens
ttctaagtgaccgca

SEQ ID NO: 2128158 - DNA, 15 bp, Homo sapiens
tctaagtgaccgcag

SEQ ID NO: 2128159 - DNA, 15 bp, Homo sapiens
ctaagtgaccgcagc

SEQ ID NO: 2128160 - DNA, 15 bp, Homo sapiens
taagtgaccgcagcc

SEQ ID NO: 2128161 - DNA, 15 bp, Homo sapiens
aagtgaccgcagcca

SEQ ID NO: 2128162 - DNA, 15 bp, Homo sapiens
agtgaccgcagccat

SEQ ID NO: 2128163 - DNA, 15 bp, Homo sapiens
gtgaccgcagccatg

SEQ ID NO: 2128164 - DNA, 15 bp, Homo sapiens
tgaccgcagccatgc

SEQ ID NO: 2128165 - DNA, 15 bp, Homo sapiens
gaccgcagccatgca

SEQ ID NO: 2128166 - DNA, 15 bp, Homo sapiens
accgcagccatgcac

SEQ ID NO: 2128167 - DNA, 15 bp, Homo sapiens
ccgcagccatgcacc

SEQ ID NO: 2128168 - DNA, 15 bp, Homo sapiens
cgcagccatgcacct

SEQ ID NO: 2128169 - DNA, 15 bp, Homo sapiens
gcagccatgcacctt

SEQ ID NO: 2128170 - DNA, 15 bp, Homo sapiens
gccatgcaccttggt

SEQ ID NO: 2128171 - DNA, 15 bp, Homo sapiens
ccatgcaccttggtc

SEQ ID NO: 2128172 - DNA, 15 bp, Homo sapiens
catgcaccttggtca

SEQ ID NO: 2128173 - DNA, 15 bp, Homo sapiens
atgcaccttggtcaa

SEQ ID NO: 2128174 - DNA, 15 bp, Homo sapiens
tgcaccttggtcaat

SEQ ID NO: 2128175 - DNA, 15 bp, Homo sapiens
gcaccttggtcaata

SEQ ID NO: 2128176 - DNA, 15 bp, Homo sapiens
caccttggtcaataa

SEQ ID NO: 2128177 - DNA, 15 bp, Homo sapiens
accttggtcaataat

SEQ ID NO: 2128178 - DNA, 15 bp, Homo sapiens
ccttggtcaataatg

SEQ ID NO: 2128179 - DNA, 15 bp, Homo sapiens
cttggtcaataatgt

SEQ ID NO: 2128180 - DNA, 15 bp, Homo sapiens
ttggtcaataatgtg

SEQ ID NO: 2128181 - DNA, 15 bp, Homo sapiens
tggtcaataatgtgt

SEQ ID NO: 2128182 - DNA, 15 bp, Homo sapiens
ggtcaataatgtgtg

SEQ ID NO: 2128183 - DNA, 15 bp, Homo sapiens
gtcaataatgtgtgt

SEQ ID NO: 2128184 - DNA, 15 bp, Homo sapiens
tcaataatgtgtgta

SEQ ID NO: 2128185 - DNA, 15 bp, Homo sapiens
caataatgtgtgtaa

SEQ ID NO: 2128186 - DNA, 15 bp, Homo sapiens
aataatgtgtgtaac

SEQ ID NO: 2128187 - DNA, 15 bp, Homo sapiens
ataatgtgtgtaact

SEQ ID NO: 2128188 - DNA, 15 bp, Homo sapiens
taatgtgtgtaactg

SEQ ID NO: 2128189 - DNA, 15 bp, Homo sapiens
tgtgtaactgcacac

SEQ ID NO: 2128190 - DNA, 15 bp, Homo sapiens
gtgtaactgcacacg

SEQ ID NO: 2128191 - DNA, 15 bp, Homo sapiens
tgtaactgcacacgg

SEQ ID NO: 2128192 - DNA, 15 bp, Homo sapiens
gtaactgcacacggc

SEQ ID NO: 2128193 - DNA, 15 bp, Homo sapiens
taactgcacacggcc

SEQ ID NO: 2128194 - DNA, 15 bp, Homo sapiens
aactgcacacggcct

SEQ ID NO: 2128195 - DNA, 15 bp, Homo sapiens
actgcacacggccta

SEQ ID NO: 2128196 - DNA, 15 bp, Homo sapiens
ctgcacacggcctat

SEQ ID NO: 2128197 - DNA, 15 bp, Homo sapiens
tgcacacggcctatc

SEQ ID NO: 2128198 - DNA, 15 bp, Homo sapiens
gcacacggcctatct

SEQ ID NO: 2128199 - DNA, 15 bp, Homo sapiens
cacacggcctatctc

SEQ ID NO: 2128200 - DNA, 15 bp, Homo sapiens
acacggcctatctca

SEQ ID NO: 2128201 - DNA, 15 bp, Homo sapiens
cacggcctatctcat

SEQ ID NO: 2128202 - DNA, 15 bp, Homo sapiens
acggcctatctcatc

SEQ ID NO: 2128203 - DNA, 15 bp, Homo sapiens
cggcctatctcatct

SEQ ID NO: 2128204 - DNA, 15 bp, Homo sapiens
ggcctatctcatctg

SEQ ID NO: 2128205 - DNA, 15 bp, Homo sapiens
gcctatctcatctga

SEQ ID NO: 2128206 - DNA, 15 bp, Homo sapiens
cctatctcatctgaa

SEQ ID NO: 2128207 - DNA, 15 bp, Homo sapiens
ctatctcatctgaat

SEQ ID NO: 2128208 - DNA, 15 bp, Homo sapiens
tatctcatctgaata

SEQ ID NO: 2128209 - DNA, 15 bp, Homo sapiens
atctcatctgaataa

SEQ ID NO: 2128210 - DNA, 15 bp, Homo sapiens
tctcatctgaataag

SEQ ID NO: 2128211 - DNA, 15 bp, Homo sapiens
ctcatctgaataagg

SEQ ID NO: 2128212 - DNA, 15 bp, Homo sapiens
tcatctgaataaggc

SEQ ID NO: 2128213 - DNA, 15 bp, Homo sapiens
catctgaataaggcc

SEQ ID NO: 2128214 - DNA, 15 bp, Homo sapiens
atctgaataaggcct

SEQ ID NO: 2128215 - DNA, 15 bp, Homo sapiens
tctgaataaggcctt

SEQ ID NO: 2128216 - DNA, 15 bp, Homo sapiens
ctgaataaggcctta

SEQ ID NO: 2128217 - DNA, 15 bp, Homo sapiens
tgaataaggccttac

SEQ ID NO: 2128218 - DNA, 15 bp, Homo sapiens
gaataaggccttact

SEQ ID NO: 2128219 - DNA, 15 bp, Homo sapiens
aataaggccttactc

SEQ ID NO: 2128220 - DNA, 15 bp, Homo sapiens
ataaggccttactct

SEQ ID NO: 2128221 - DNA, 15 bp, Homo sapiens
taaggccttactctc

SEQ ID NO: 2128222 - DNA, 15 bp, Homo sapiens
aaggccttactctca

SEQ ID NO: 2128223 - DNA, 15 bp, Homo sapiens
aggccttactctcag

SEQ ID NO: 2128224 - DNA, 15 bp, Homo sapiens
ggccttactctcaga

SEQ ID NO: 2128225 - DNA, 15 bp, Homo sapiens
gccttactctcagac

SEQ ID NO: 2128226 - DNA, 15 bp, Homo sapiens
ccttactctcagacc

SEQ ID NO: 2128227 - DNA, 15 bp, Homo sapiens
cttactctcagaccc

SEQ ID NO: 2128228 - DNA, 15 bp, Homo sapiens
ttactctcagacccc

SEQ ID NO: 2128229 - DNA, 15 bp, Homo sapiens
gcaggggtgctgata

SEQ ID NO: 2128230 - DNA, 15 bp, Homo sapiens
caggggtgctgataa

SEQ ID NO: 2128231 - DNA, 15 bp, Homo sapiens
aggggtgctgataac

SEQ ID NO: 2128232 - DNA, 15 bp, Homo sapiens
ggggtgctgataacc

SEQ ID NO: 2128233 - DNA, 15 bp, Homo sapiens
gggtgctgataacca

SEQ ID NO: 2128234 - DNA, 15 bp, Homo sapiens
ggtgctgataaccaa

SEQ ID NO: 2128235 - DNA, 15 bp, Homo sapiens
gataaccaaggccca

SEQ ID NO: 2128236 - DNA, 15 bp, Homo sapiens
ataaccaaggcccat

SEQ ID NO: 2128237 - DNA, 15 bp, Homo sapiens
taaccaaggcccatt

SEQ ID NO: 2128238 - DNA, 15 bp, Homo sapiens
aaccaaggcccattt

SEQ ID NO: 2128239 - DNA, 15 bp, Homo sapiens
accaaggcccatttt

SEQ ID NO: 2128240 - DNA, 15 bp, Homo sapiens
ccaaggcccattttc

SEQ ID NO: 2128241 - DNA, 15 bp, Homo sapiens
caaggcccattttcc

SEQ ID NO: 2128242 - DNA, 15 bp, Homo sapiens
aaggcccattttcct

SEQ ID NO: 2128243 - DNA, 15 bp, Homo sapiens
aggcccattttcctg

SEQ ID NO: 2128244 - DNA, 15 bp, Homo sapiens
ggcccattttcctgg

SEQ ID NO: 2128245 - DNA, 15 bp, Homo sapiens
gcccattttcctggc

SEQ ID NO: 2128246 - DNA, 15 bp, Homo sapiens
cccattttcctggcc

SEQ ID NO: 2128247 - DNA, 15 bp, Homo sapiens
ccattttcctggcct

SEQ ID NO: 2128248 - DNA, 15 bp, Homo sapiens
cattttcctggcctg

SEQ ID NO: 2128249 - DNA, 15 bp, Homo sapiens
attttcctggcctgt

SEQ ID NO: 2128250 - DNA, 15 bp, Homo sapiens
tgattatatttgtcc

SEQ ID NO: 2128251 - DNA, 15 bp, Homo sapiens
gattatatttgtcca

SEQ ID NO: 2128252 - DNA, 15 bp, Homo sapiens
attatatttgtccag

SEQ ID NO: 2128253 - DNA, 15 bp, Homo sapiens
ttatatttgtccagg

SEQ ID NO: 2128254 - DNA, 15 bp, Homo sapiens
tatatttgtccaggt

SEQ ID NO: 2128255 - DNA, 15 bp, Homo sapiens
atatttgtccaggtt

SEQ ID NO: 2128256 - DNA, 15 bp, Homo sapiens
tatttgtccaggttt

SEQ ID NO: 2128257 - DNA, 15 bp, Homo sapiens
atttgtccaggtttc

SEQ ID NO: 2128258 - DNA, 15 bp, Homo sapiens
tttgtccaggtttct

SEQ ID NO: 2128259 - DNA, 15 bp, Homo sapiens
ttgtccaggtttctg

SEQ ID NO: 2128260 - DNA, 15 bp, Homo sapiens
tgtccaggtttctgt

SEQ ID NO: 2128261 - DNA, 15 bp, Homo sapiens
gtccaggtttctgtg

SEQ ID NO: 2128262 - DNA, 15 bp, Homo sapiens
tccaggtttctgtgt

SEQ ID NO: 2128263 - DNA, 15 bp, Homo sapiens
ccaggtttctgtgta

SEQ ID NO: 2128264 - DNA, 15 bp, Homo sapiens
caggtttctgtgtac

SEQ ID NO: 2128265 - DNA, 15 bp, Homo sapiens
aggtttctgtgtact

SEQ ID NO: 2128266 - DNA, 15 bp, Homo sapiens
ggtttctgtgtacta

SEQ ID NO: 2128267 - DNA, 15 bp, Homo sapiens
gtttctgtgtactag

SEQ ID NO: 2128268 - DNA, 15 bp, Homo sapiens
tttctgtgtactaga

SEQ ID NO: 2128269 - DNA, 15 bp, Homo sapiens
ttctgtgtactagac

SEQ ID NO: 2128270 - DNA, 15 bp, Homo sapiens
tctgtgtactagaca

SEQ ID NO: 2128271 - DNA, 15 bp, Homo sapiens
ctgtgtactagacaa

SEQ ID NO: 2128272 - DNA, 15 bp, Homo sapiens
tgtgtactagacaag

SEQ ID NO: 2128273 - DNA, 15 bp, Homo sapiens
gtgtactagacaagg

SEQ ID NO: 2128274 - DNA, 15 bp, Homo sapiens
tgtactagacaagga

SEQ ID NO: 2128275 - DNA, 15 bp, Homo sapiens
gtactagacaaggaa

SEQ ID NO: 2128276 - DNA, 15 bp, Homo sapiens
tactagacaaggaag

SEQ ID NO: 2128277 - DNA, 15 bp, Homo sapiens
actagacaaggaagc

SEQ ID NO: 2128278 - DNA, 15 bp, Homo sapiens
ctagacaaggaagcc

SEQ ID NO: 2128279 - DNA, 15 bp, Homo sapiens
agacaaggaagcctc

SEQ ID NO: 2128280 - DNA, 15 bp, Homo sapiens
gacaaggaagcctcc

SEQ ID NO: 2128281 - DNA, 15 bp, Homo sapiens
acaaggaagcctcct

SEQ ID NO: 2128282 - DNA, 15 bp, Homo sapiens
caaggaagcctcctc

SEQ ID NO: 2128283 - DNA, 15 bp, Homo sapiens
aaggaagcctcctct

SEQ ID NO: 2128284 - DNA, 15 bp, Homo sapiens
aggaagcctcctctg

SEQ ID NO: 2128285 - DNA, 15 bp, Homo sapiens
ggaagcctcctctgc

SEQ ID NO: 2128286 - DNA, 15 bp, Homo sapiens
gaagcctcctctgcc

SEQ ID NO: 2128287 - DNA, 15 bp, Homo sapiens
aagcctcctctgccc

SEQ ID NO: 2128288 - DNA, 15 bp, Homo sapiens
agcctcctctgcccc

SEQ ID NO: 2128289 - DNA, 15 bp, Homo sapiens
gcctcctctgcccca

SEQ ID NO: 2128290 - DNA, 15 bp, Homo sapiens
cctcctctgccccat

SEQ ID NO: 2128291 - DNA, 15 bp, Homo sapiens
ctcctctgccccatc

SEQ ID NO: 2128292 - DNA, 15 bp, Homo sapiens
tcctctgccccatcc

SEQ ID NO: 2128293 - DNA, 15 bp, Homo sapiens
cctctgccccatccc

SEQ ID NO: 2128294 - DNA, 15 bp, Homo sapiens
ctctgccccatccca

SEQ ID NO: 2128295 - DNA, 15 bp, Homo sapiens
tctgccccatcccat

SEQ ID NO: 2128296 - DNA, 15 bp, Homo sapiens
ctgccccatcccatc

SEQ ID NO: 2128297 - DNA, 15 bp, Homo sapiens
tgccccatcccatct

SEQ ID NO: 2128298 - DNA, 15 bp, Homo sapiens
gccccatcccatcta

SEQ ID NO: 2128299 - DNA, 15 bp, Homo sapiens
ccccatcccatctac

SEQ ID NO: 2128300 - DNA, 15 bp, Homo sapiens
cccatcccatctacg

SEQ ID NO: 2128301 - DNA, 15 bp, Homo sapiens
ccatcccatctacgc

SEQ ID NO: 2128302 - DNA, 15 bp, Homo sapiens
catcccatctacgca

SEQ ID NO: 2128303 - DNA, 15 bp, Homo sapiens
atcccatctacgcat

SEQ ID NO: 2128304 - DNA, 15 bp, Homo sapiens
tcccatctacgcata

SEQ ID NO: 2128305 - DNA, 15 bp, Homo sapiens
cccatctacgcataa

SEQ ID NO: 2128306 - DNA, 15 bp, Homo sapiens
ccatctacgcataat

SEQ ID NO: 2128307 - DNA, 15 bp, Homo sapiens
catctacgcataatc

SEQ ID NO: 2128308 - DNA, 15 bp, Homo sapiens
atctacgcataatct

SEQ ID NO: 2128309 - DNA, 15 bp, Homo sapiens
tctacgcataatctt

SEQ ID NO: 2128310 - DNA, 15 bp, Homo sapiens
ctacgcataatcttt

SEQ ID NO: 2128311 - DNA, 15 bp, Homo sapiens
tacgcataatctttc

SEQ ID NO: 2128312 - DNA, 15 bp, Homo sapiens
acgcataatctttct

SEQ ID NO: 2128313 - DNA, 15 bp, Homo sapiens
cgcataatctttctt

SEQ ID NO: 2128314 - DNA, 15 bp, Homo sapiens
gcataatctttcttt

SEQ ID NO: 2128315 - DNA, 15 bp, Homo sapiens
cataatctttctttt

SEQ ID NO: 2128316 - DNA, 15 bp, Homo sapiens
ataatctttcttttc

SEQ ID NO: 2128317 - DNA, 15 bp, Homo sapiens
taatctttcttttcc

SEQ ID NO: 2128318 - DNA, 15 bp, Homo sapiens
aatctttcttttcct

SEQ ID NO: 2128319 - DNA, 15 bp, Homo sapiens
atctttcttttcctc

SEQ ID NO: 2128320 - DNA, 15 bp, Homo sapiens
tctttcttttcctcc

SEQ ID NO: 2128321 - DNA, 15 bp, Homo sapiens
ctttcttttcctccc

SEQ ID NO: 2128322 - DNA, 15 bp, Homo sapiens
tttcttttcctccca

SEQ ID NO: 2128323 - DNA, 15 bp, Homo sapiens
ttcttttcctcccag

SEQ ID NO: 2128324 - DNA, 15 bp, Homo sapiens
tcttttcctcccagc

SEQ ID NO: 2128325 - DNA, 15 bp, Homo sapiens
cttttcctcccagca

SEQ ID NO: 2128326 - DNA, 15 bp, Homo sapiens
ttttcctcccagcag

SEQ ID NO: 2128327 - DNA, 15 bp, Homo sapiens
tttcctcccagcagg

SEQ ID NO: 2128328 - DNA, 15 bp, Homo sapiens
ttcctcccagcaggg

SEQ ID NO: 2128329 - DNA, 15 bp, Homo sapiens
tcctcccagcaggga

SEQ ID NO: 2128330 - DNA, 15 bp, Homo sapiens
cctcccagcagggag

SEQ ID NO: 2128331 - DNA, 15 bp, Homo sapiens
ctcccagcagggagt

SEQ ID NO: 2128332 - DNA, 15 bp, Homo sapiens
tcccagcagggagtg

SEQ ID NO: 2128333 - DNA, 15 bp, Homo sapiens
cccagcagggagtgc

SEQ ID NO: 2128334 - DNA, 15 bp, Homo sapiens
ccagcagggagtgct

SEQ ID NO: 2128335 - DNA, 15 bp, Homo sapiens
cagcagggagtgctc

SEQ ID NO: 2128336 - DNA, 15 bp, Homo sapiens
agcagggagtgctca

SEQ ID NO: 2128337 - DNA, 15 bp, Homo sapiens
gcagggagtgctcac

SEQ ID NO: 2128338 - DNA, 15 bp, Homo sapiens
cagggagtgctcact

SEQ ID NO: 2128339 - DNA, 15 bp, Homo sapiens
agggagtgctcactc

SEQ ID NO: 2128340 - DNA, 15 bp, Homo sapiens
gggagtgctcactcc

SEQ ID NO: 2128341 - DNA, 15 bp, Homo sapiens
ggagtgctcactcca

SEQ ID NO: 2128342 - DNA, 15 bp, Homo sapiens
gagtgctcactccat

SEQ ID NO: 2128343 - DNA, 15 bp, Homo sapiens
agtgctcactccata

SEQ ID NO: 2128344 - DNA, 15 bp, Homo sapiens
gtgctcactccataa

SEQ ID NO: 2128345 - DNA, 15 bp, Homo sapiens
tgctcactccataag

SEQ ID NO: 2128346 - DNA, 15 bp, Homo sapiens
gctcactccataaga

SEQ ID NO: 2128347 - DNA, 15 bp, Homo sapiens
ctcactccataagac

SEQ ID NO: 2128348 - DNA, 15 bp, Homo sapiens
tcactccataagacc

SEQ ID NO: 2128349 - DNA, 15 bp, Homo sapiens
cactccataagaccc

SEQ ID NO: 2128350 - DNA, 15 bp, Homo sapiens
actccataagaccct

SEQ ID NO: 2128351 - DNA, 15 bp, Homo sapiens
gtaagtgaccacaac

SEQ ID NO: 2128352 - DNA, 15 bp, Homo sapiens
taagtgaccacaacc

SEQ ID NO: 2128353 - DNA, 15 bp, Homo sapiens
aagtgaccacaacca

SEQ ID NO: 2128354 - DNA, 15 bp, Homo sapiens
agtgaccacaaccat

SEQ ID NO: 2128355 - DNA, 15 bp, Homo sapiens
accacaaccatgcat

SEQ ID NO: 2128356 - DNA, 15 bp, Homo sapiens
ccacaaccatgcatc

SEQ ID NO: 2128357 - DNA, 15 bp, Homo sapiens
cacaaccatgcatct

SEQ ID NO: 2128358 - DNA, 15 bp, Homo sapiens
acaaccatgcatctt

SEQ ID NO: 2128359 - DNA, 15 bp, Homo sapiens
caaccatgcatcttg

SEQ ID NO: 2128360 - DNA, 15 bp, Homo sapiens
aaccatgcatcttgg

SEQ ID NO: 2128361 - DNA, 15 bp, Homo sapiens
accatgcatcttgga

SEQ ID NO: 2128362 - DNA, 15 bp, Homo sapiens
ccatgcatcttggaa

SEQ ID NO: 2128363 - DNA, 15 bp, Homo sapiens
catgcatcttggaaa

SEQ ID NO: 2128364 - DNA, 15 bp, Homo sapiens
atgcatcttggaaat

SEQ ID NO: 2128365 - DNA, 15 bp, Homo sapiens
tgcatcttggaaatt

SEQ ID NO: 2128366 - DNA, 15 bp, Homo sapiens
gcatcttggaaattt

SEQ ID NO: 2128367 - DNA, 15 bp, Homo sapiens
catcttggaaattta

SEQ ID NO: 2128368 - DNA, 15 bp, Homo sapiens
tcttggaaatttatg

SEQ ID NO: 2128369 - DNA, 15 bp, Homo sapiens
cttggaaatttatgt

SEQ ID NO: 2128370 - DNA, 15 bp, Homo sapiens
ttggaaatttatgtg

SEQ ID NO: 2128371 - DNA, 15 bp, Homo sapiens
tggaaatttatgtgc

SEQ ID NO: 2128372 - DNA, 15 bp, Homo sapiens
ggaaatttatgtgca

SEQ ID NO: 2128373 - DNA, 15 bp, Homo sapiens
gaaatttatgtgcat

SEQ ID NO: 2128374 - DNA, 15 bp, Homo sapiens
aaatttatgtgcata

SEQ ID NO: 2128375 - DNA, 15 bp, Homo sapiens
aatttatgtgcataa

SEQ ID NO: 2128376 - DNA, 15 bp, Homo sapiens
atttatgtgcataac

SEQ ID NO: 2128377 - DNA, 15 bp, Homo sapiens
tttatgtgcataact

SEQ ID NO: 2128378 - DNA, 15 bp, Homo sapiens
ttatgtgcataactg

SEQ ID NO: 2128379 - DNA, 15 bp, Homo sapiens
tatgtgcataactgc

SEQ ID NO: 2128380 - DNA, 15 bp, Homo sapiens
taactgcacatggct

SEQ ID NO: 2128381 - DNA, 15 bp, Homo sapiens
aactgcacatggctt

SEQ ID NO: 2128382 - DNA, 15 bp, Homo sapiens
actgcacatggctta

SEQ ID NO: 2128383 - DNA, 15 bp, Homo sapiens
ctgcacatggcttat

SEQ ID NO: 2128384 - DNA, 15 bp, Homo sapiens
tgcacatggcttatc

SEQ ID NO: 2128385 - DNA, 15 bp, Homo sapiens
gcacatggcttatcc

SEQ ID NO: 2128386 - DNA, 15 bp, Homo sapiens
cacatggcttatcct

SEQ ID NO: 2128387 - DNA, 15 bp, Homo sapiens
acatggcttatccta

SEQ ID NO: 2128388 - DNA, 15 bp, Homo sapiens
catggcttatcctat

SEQ ID NO: 2128389 - DNA, 15 bp, Homo sapiens
atggcttatcctatt

SEQ ID NO: 2128390 - DNA, 15 bp, Homo sapiens
tggcttatcctattt

SEQ ID NO: 2128391 - DNA, 15 bp, Homo sapiens
ggcttatcctatttg

SEQ ID NO: 2128392 - DNA, 15 bp, Homo sapiens
gcttatcctatttga

SEQ ID NO: 2128393 - DNA, 15 bp, Homo sapiens
cttatcctatttgaa

SEQ ID NO: 2128394 - DNA, 15 bp, Homo sapiens
ttatcctatttgaat

SEQ ID NO: 2128395 - DNA, 15 bp, Homo sapiens
tatcctatttgaata

SEQ ID NO: 2128396 - DNA, 15 bp, Homo sapiens
atcctatttgaataa

SEQ ID NO: 2128397 - DNA, 15 bp, Homo sapiens
tcctatttgaataaa

SEQ ID NO: 2128398 - DNA, 15 bp, Homo sapiens
cctatttgaataaag

SEQ ID NO: 2128399 - DNA, 15 bp, Homo sapiens
ctatttgaataaagt

SEQ ID NO: 2128400 - DNA, 15 bp, Homo sapiens
tatttgaataaagtc

SEQ ID NO: 2128401 - DNA, 15 bp, Homo sapiens
atttgaataaagtcc

SEQ ID NO: 2128402 - DNA, 15 bp, Homo sapiens
tttgaataaagtcct

SEQ ID NO: 2128403 - DNA, 15 bp, Homo sapiens
ttgaataaagtccta

SEQ ID NO: 2128404 - DNA, 15 bp, Homo sapiens
tgaataaagtcctac

SEQ ID NO: 2128405 - DNA, 15 bp, Homo sapiens
gaataaagtcctact

SEQ ID NO: 2128406 - DNA, 15 bp, Homo sapiens
aataaagtcctactc

SEQ ID NO: 2128407 - DNA, 15 bp, Homo sapiens
ataaagtcctactct

SEQ ID NO: 2128408 - DNA, 15 bp, Homo sapiens
taaagtcctactctc

SEQ ID NO: 2128409 - DNA, 15 bp, Homo sapiens
aaagtcctactctca

SEQ ID NO: 2128410 - DNA, 15 bp, Homo sapiens
aagtcctactctcag

SEQ ID NO: 2128411 - DNA, 15 bp, Homo sapiens
agtcctactctcaga

SEQ ID NO: 2128412 - DNA, 15 bp, Homo sapiens
tactctcagaccccc

SEQ ID NO: 2128413 - DNA, 15 bp, Homo sapiens
actctcagaccccct

SEQ ID NO: 2128414 - DNA, 15 bp, Homo sapiens
ctctcagaccccctt

SEQ ID NO: 2128415 - DNA, 15 bp, Homo sapiens
tctcagacccccttt

SEQ ID NO: 2128416 - DNA, 15 bp, Homo sapiens
ctcagaccccctttg

SEQ ID NO: 2128417 - DNA, 15 bp, Homo sapiens
tcagaccccctttgc

SEQ ID NO: 2128418 - DNA, 15 bp, Homo sapiens
cagaccccctttgca

SEQ ID NO: 2128419 - DNA, 15 bp, Homo sapiens
agaccccctttgcag

SEQ ID NO: 2128420 - DNA, 15 bp, Homo sapiens
gaccccctttgcagt

SEQ ID NO: 2128421 - DNA, 15 bp, Homo sapiens
accccctttgcagta

SEQ ID NO: 2128422 - DNA, 15 bp, Homo sapiens
ccccctttgcagtat

SEQ ID NO: 2128423 - DNA, 15 bp, Homo sapiens
cccctttgcagtata

SEQ ID NO: 2128424 - DNA, 15 bp, Homo sapiens
ccctttgcagtatag

SEQ ID NO: 2128425 - DNA, 15 bp, Homo sapiens
cctttgcagtatagc

SEQ ID NO: 2128426 - DNA, 15 bp, Homo sapiens
ctttgcagtatagct

SEQ ID NO: 2128427 - DNA, 15 bp, Homo sapiens
tttgcagtatagctg

SEQ ID NO: 2128428 - DNA, 15 bp, Homo sapiens
ttgcagtatagctgg

SEQ ID NO: 2128429 - DNA, 15 bp, Homo sapiens
tgcagtatagctggg

SEQ ID NO: 2128430 - DNA, 15 bp, Homo sapiens
gcagtatagctgggg

SEQ ID NO: 2128431 - DNA, 15 bp, Homo sapiens
cagtatagctggggt

SEQ ID NO: 2128432 - DNA, 15 bp, Homo sapiens
agtatagctggggtg

SEQ ID NO: 2128433 - DNA, 15 bp, Homo sapiens
gtatagctggggtgc

SEQ ID NO: 2128434 - DNA, 15 bp, Homo sapiens
tatagctggggtgct

SEQ ID NO: 2128435 - DNA, 15 bp, Homo sapiens
atagctggggtgctg

SEQ ID NO: 2128436 - DNA, 15 bp, Homo sapiens
tagctggggtgctga

SEQ ID NO: 2128437 - DNA, 15 bp, Homo sapiens
agctggggtgctgat

SEQ ID NO: 2128438 - DNA, 15 bp, Homo sapiens
gctggggtgctgatc

SEQ ID NO: 2128439 - DNA, 15 bp, Homo sapiens
ctggggtgctgatca

SEQ ID NO: 2128440 - DNA, 15 bp, Homo sapiens
tggggtgctgatcac

SEQ ID NO: 2128441 - DNA, 15 bp, Homo sapiens
ggggtgctgatcact

SEQ ID NO: 2128442 - DNA, 15 bp, Homo sapiens
gggtgctgatcactg

SEQ ID NO: 2128443 - DNA, 15 bp, Homo sapiens
ggtgctgatcactga

SEQ ID NO: 2128444 - DNA, 15 bp, Homo sapiens
gtgctgatcactgag

SEQ ID NO: 2128445 - DNA, 15 bp, Homo sapiens
tgctgatcactgagg

SEQ ID NO: 2128446 - DNA, 15 bp, Homo sapiens
gctgatcactgaggc

SEQ ID NO: 2128447 - DNA, 15 bp, Homo sapiens
ctgatcactgaggcc

SEQ ID NO: 2128448 - DNA, 15 bp, Homo sapiens
tgatcactgaggcct

SEQ ID NO: 2128449 - DNA, 15 bp, Homo sapiens
gatcactgaggcctc

SEQ ID NO: 2128450 - DNA, 15 bp, Homo sapiens
atcactgaggcctct

SEQ ID NO: 2128451 - DNA, 15 bp, Homo sapiens
tcactgaggcctctt

SEQ ID NO: 2128452 - DNA, 15 bp, Homo sapiens
cactgaggcctcttt

SEQ ID NO: 2128453 - DNA, 15 bp, Homo sapiens
actgaggcctctttg

SEQ ID NO: 2128454 - DNA, 15 bp, Homo sapiens
ctgaggcctctttgc

SEQ ID NO: 2128455 - DNA, 15 bp, Homo sapiens
tgaggcctctttgct

SEQ ID NO: 2128456 - DNA, 15 bp, Homo sapiens
gaggcctctttgctt

SEQ ID NO: 2128457 - DNA, 15 bp, Homo sapiens
aggcctctttgcttg

SEQ ID NO: 2128458 - DNA, 15 bp, Homo sapiens
ggcctctttgcttgg

SEQ ID NO: 2128459 - DNA, 15 bp, Homo sapiens
gcctctttgcttggc

SEQ ID NO: 2128460 - DNA, 15 bp, Homo sapiens
cctctttgcttggct

SEQ ID NO: 2128461 - DNA, 15 bp, Homo sapiens
ctctttgcttggctt

SEQ ID NO: 2128462 - DNA, 15 bp, Homo sapiens
tctttgcttggcttg

SEQ ID NO: 2128463 - DNA, 15 bp, Homo sapiens
ctttgcttggcttgt

SEQ ID NO: 2128464 - DNA, 15 bp, Homo sapiens
tttgcttggcttgtc

SEQ ID NO: 2128465 - DNA, 15 bp, Homo sapiens
ttgcttggcttgtct

SEQ ID NO: 2128466 - DNA, 15 bp, Homo sapiens
tgcttggcttgtcta

SEQ ID NO: 2128467 - DNA, 15 bp, Homo sapiens
gcttggcttgtctat

SEQ ID NO: 2128468 - DNA, 15 bp, Homo sapiens
cttggcttgtctata

SEQ ID NO: 2128469 - DNA, 15 bp, Homo sapiens
ttggcttgtctatat

SEQ ID NO: 2128470 - DNA, 15 bp, Homo sapiens
tggcttgtctatatt

SEQ ID NO: 2128471 - DNA, 15 bp, Homo sapiens
ggcttgtctatattc

SEQ ID NO: 2128472 - DNA, 15 bp, Homo sapiens
gcttgtctatattct

SEQ ID NO: 2128473 - DNA, 15 bp, Homo sapiens
cttgtctatattctt

SEQ ID NO: 2128474 - DNA, 15 bp, Homo sapiens
ttgtctatattcttg

SEQ ID NO: 2128475 - DNA, 15 bp, Homo sapiens
tgtctatattcttgt

SEQ ID NO: 2128476 - DNA, 15 bp, Homo sapiens
gtctatattcttgtg

SEQ ID NO: 2128477 - DNA, 15 bp, Homo sapiens
tctatattcttgtgt

SEQ ID NO: 2128478 - DNA, 15 bp, Homo sapiens
ctatattcttgtgta

SEQ ID NO: 2128479 - DNA, 15 bp, Homo sapiens
tatattcttgtgtac

SEQ ID NO: 2128480 - DNA, 15 bp, Homo sapiens
atattcttgtgtact

SEQ ID NO: 2128481 - DNA, 15 bp, Homo sapiens
tattcttgtgtacta

SEQ ID NO: 2128482 - DNA, 15 bp, Homo sapiens
attcttgtgtactag

SEQ ID NO: 2128483 - DNA, 15 bp, Homo sapiens
ttcttgtgtactaga

SEQ ID NO: 2128484 - DNA, 15 bp, Homo sapiens
tcttgtgtactagat

SEQ ID NO: 2128485 - DNA, 15 bp, Homo sapiens
cttgtgtactagata

SEQ ID NO: 2128486 - DNA, 15 bp, Homo sapiens
ttgtgtactagataa

SEQ ID NO: 2128487 - DNA, 15 bp, Homo sapiens
tgtgtactagataag

SEQ ID NO: 2128488 - DNA, 15 bp, Homo sapiens
gtgtactagataagg

SEQ ID NO: 2128489 - DNA, 15 bp, Homo sapiens
tgtactagataaggg

SEQ ID NO: 2128490 - DNA, 15 bp, Homo sapiens
gtactagataagggc

SEQ ID NO: 2128491 - DNA, 15 bp, Homo sapiens
tactagataagggca

SEQ ID NO: 2128492 - DNA, 15 bp, Homo sapiens
actagataagggcac

SEQ ID NO: 2128493 - DNA, 15 bp, Homo sapiens
ctagataagggcacc

SEQ ID NO: 2128494 - DNA, 15 bp, Homo sapiens
tagataagggcacct

SEQ ID NO: 2128495 - DNA, 15 bp, Homo sapiens
agataagggcacctt

SEQ ID NO: 2128496 - DNA, 15 bp, Homo sapiens
gataagggcaccttc

SEQ ID NO: 2128497 - DNA, 15 bp, Homo sapiens
ataagggcaccttct

SEQ ID NO: 2128498 - DNA, 15 bp, Homo sapiens
taagggcaccttctc

SEQ ID NO: 2128499 - DNA, 15 bp, Homo sapiens
aagggcaccttctca

SEQ ID NO: 2128500 - DNA, 15 bp, Homo sapiens
agggcaccttctcat

SEQ ID NO: 2128501 - DNA, 15 bp, Homo sapiens
gggcaccttctcatg

SEQ ID NO: 2128502 - DNA, 15 bp, Homo sapiens
ggcaccttctcatgg

SEQ ID NO: 2128503 - DNA, 15 bp, Homo sapiens
gcaccttctcatgga

SEQ ID NO: 2128504 - DNA, 15 bp, Homo sapiens
caccttctcatggac

SEQ ID NO: 2128505 - DNA, 15 bp, Homo sapiens
accttctcatggact

SEQ ID NO: 2128506 - DNA, 15 bp, Homo sapiens
ccttctcatggactc

SEQ ID NO: 2128507 - DNA, 15 bp, Homo sapiens
cttctcatggactcc

SEQ ID NO: 2128508 - DNA, 15 bp, Homo sapiens
ttctcatggactccc

SEQ ID NO: 2128509 - DNA, 15 bp, Homo sapiens
tctcatggactccct

SEQ ID NO: 2128510 - DNA, 15 bp, Homo sapiens
ctcatggactccctt

SEQ ID NO: 2128511 - DNA, 15 bp, Homo sapiens
tcatggactcccttt

SEQ ID NO: 2128512 - DNA, 15 bp, Homo sapiens
catggactccctttg

SEQ ID NO: 2128513 - DNA, 15 bp, Homo sapiens
atggactccctttgc

SEQ ID NO: 2128514 - DNA, 15 bp, Homo sapiens
tggactccctttgct

SEQ ID NO: 2128515 - DNA, 15 bp, Homo sapiens
ggactccctttgctt

SEQ ID NO: 2128516 - DNA, 15 bp, Homo sapiens
gactccctttgcttt

SEQ ID NO: 2128517 - DNA, 15 bp, Homo sapiens
actccctttgctttt

SEQ ID NO: 2128518 - DNA, 15 bp, Homo sapiens
ctccctttgcttttc

SEQ ID NO: 2128519 - DNA, 15 bp, Homo sapiens
tccctttgcttttca

SEQ ID NO: 2128520 - DNA, 15 bp, Homo sapiens
ccctttgcttttcaa

SEQ ID NO: 2128521 - DNA, 15 bp, Homo sapiens
cctttgcttttcaac

SEQ ID NO: 2128522 - DNA, 15 bp, Homo sapiens
ctttgcttttcaaca

SEQ ID NO: 2128523 - DNA, 15 bp, Homo sapiens
tttgcttttcaacaa

SEQ ID NO: 2128524 - DNA, 15 bp, Homo sapiens
ttgcttttcaacaag

SEQ ID NO: 2128525 - DNA, 15 bp, Homo sapiens
tgcttttcaacaagg

SEQ ID NO: 2128526 - DNA, 15 bp, Homo sapiens
gcttttcaacaagga

SEQ ID NO: 2128527 - DNA, 15 bp, Homo sapiens
cttttcaacaaggag

SEQ ID NO: 2128528 - DNA, 15 bp, Homo sapiens
ttttcaacaaggagt

SEQ ID NO: 2128529 - DNA, 15 bp, Homo sapiens
tttcaacaaggagta

SEQ ID NO: 2128530 - DNA, 15 bp, Homo sapiens
ttcaacaaggagtac

SEQ ID NO: 2128531 - DNA, 15 bp, Homo sapiens
tcaacaaggagtacc

SEQ ID NO: 2128532 - DNA, 15 bp, Homo sapiens
caacaaggagtaccc

SEQ ID NO: 2128533 - DNA, 15 bp, Homo sapiens
aacaaggagtaccca

SEQ ID NO: 2128534 - DNA, 15 bp, Homo sapiens
acaaggagtacccac

SEQ ID NO: 2128535 - DNA, 15 bp, Homo sapiens
caaggagtacccact

SEQ ID NO: 2128536 - DNA, 15 bp, Homo sapiens
aaggagtacccacta

SEQ ID NO: 2128537 - DNA, 15 bp, Homo sapiens
aggagtacccactac

SEQ ID NO: 2128538 - DNA, 15 bp, Homo sapiens
ggagtacccactact

SEQ ID NO: 2128539 - DNA, 15 bp, Homo sapiens
gagtacccactactt

SEQ ID NO: 2128540 - DNA, 15 bp, Homo sapiens
agtacccactacttt

SEQ ID NO: 2128541 - DNA, 15 bp, Homo sapiens
gtacccactactttt

SEQ ID NO: 2128542 - DNA, 15 bp, Homo sapiens
tacccactacttttt

SEQ ID NO: 2128543 - DNA, 15 bp, Homo sapiens
acccactacttttta

SEQ ID NO: 2128544 - DNA, 15 bp, Homo sapiens
cccactactttttaa

SEQ ID NO: 2128545 - DNA, 15 bp, Homo sapiens
ccactactttttaag

SEQ ID NO: 2128546 - DNA, 15 bp, Homo sapiens
cactactttttaaga

SEQ ID NO: 2128547 - DNA, 15 bp, Homo sapiens
actactttttaagat

SEQ ID NO: 2128548 - DNA, 15 bp, Homo sapiens
ctactttttaagatt

SEQ ID NO: 2128549 - DNA, 15 bp, Homo sapiens
tactttttaagattc

SEQ ID NO: 2128550 - DNA, 15 bp, Homo sapiens
actttttaagattct

SEQ ID NO: 2128551 - DNA, 15 bp, Homo sapiens
ctttttaagattctt

SEQ ID NO: 2128552 - DNA, 15 bp, Homo sapiens
tttttaagattctta

SEQ ID NO: 2128553 - DNA, 15 bp, Homo sapiens
ttttaagattcttat

SEQ ID NO: 2128554 - DNA, 15 bp, Homo sapiens
tttaagattcttata

SEQ ID NO: 2128555 - DNA, 15 bp, Homo sapiens
ttaagattcttatat

SEQ ID NO: 2128556 - DNA, 15 bp, Homo sapiens
taagattcttatatt

SEQ ID NO: 2128557 - DNA, 15 bp, Homo sapiens
aagattcttatattt

SEQ ID NO: 2128558 - DNA, 15 bp, Homo sapiens
agattcttatatttg

SEQ ID NO: 2128559 - DNA, 15 bp, Homo sapiens
gattcttatatttgt

SEQ ID NO: 2128560 - DNA, 15 bp, Homo sapiens
attcttatatttgtc

SEQ ID NO: 2128561 - DNA, 15 bp, Homo sapiens
ttcttatatttgtcc

SEQ ID NO: 2128562 - DNA, 15 bp, Homo sapiens
tcttatatttgtcca

SEQ ID NO: 2128563 - DNA, 15 bp, Homo sapiens
cttatatttgtccaa

SEQ ID NO: 2128564 - DNA, 15 bp, Homo sapiens
ttatatttgtccaaa

SEQ ID NO: 2128565 - DNA, 15 bp, Homo sapiens
tatatttgtccaaag

SEQ ID NO: 2128566 - DNA, 15 bp, Homo sapiens
atatttgtccaaagt

SEQ ID NO: 2128567 - DNA, 15 bp, Homo sapiens
tatttgtccaaagta

SEQ ID NO: 2128568 - DNA, 15 bp, Homo sapiens
atttgtccaaagtac

SEQ ID NO: 2128569 - DNA, 15 bp, Homo sapiens
tttgtccaaagtaca

SEQ ID NO: 2128570 - DNA, 15 bp, Homo sapiens
ttgtccaaagtacat

SEQ ID NO: 2128571 - DNA, 15 bp, Homo sapiens
tgtccaaagtacatg

SEQ ID NO: 2128572 - DNA, 15 bp, Homo sapiens
gtccaaagtacatgg

SEQ ID NO: 2128573 - DNA, 15 bp, Homo sapiens
tccaaagtacatggt

SEQ ID NO: 2128574 - DNA, 15 bp, Homo sapiens
ccaaagtacatggtt

SEQ ID NO: 2128575 - DNA, 15 bp, Homo sapiens
caaagtacatggttt

SEQ ID NO: 2128576 - DNA, 15 bp, Homo sapiens
aaagtacatggtttt

SEQ ID NO: 2128577 - DNA, 15 bp, Homo sapiens
aagtacatggtttta

SEQ ID NO: 2128578 - DNA, 15 bp, Homo sapiens
agtacatggttttaa

SEQ ID NO: 2128579 - DNA, 15 bp, Homo sapiens
gtacatggttttaat

SEQ ID NO: 2128580 - DNA, 15 bp, Homo sapiens
tacatggttttaatt

SEQ ID NO: 2128581 - DNA, 15 bp, Homo sapiens
acatggttttaattg

SEQ ID NO: 2128582 - DNA, 15 bp, Homo sapiens
catggttttaattga

SEQ ID NO: 2128583 - DNA, 15 bp, Homo sapiens
atggttttaattgac

SEQ ID NO: 2128584 - DNA, 15 bp, Homo sapiens
tggttttaattgacc

SEQ ID NO: 2128585 - DNA, 15 bp, Homo sapiens
ggttttaattgacca

SEQ ID NO: 2128586 - DNA, 15 bp, Homo sapiens
gttttaattgaccac

SEQ ID NO: 2128587 - DNA, 15 bp, Homo sapiens
ttttaattgaccaca

SEQ ID NO: 2128588 - DNA, 15 bp, Homo sapiens
tttaattgaccacaa

SEQ ID NO: 2128589 - DNA, 15 bp, Homo sapiens
ttaattgaccacaac

SEQ ID NO: 2128590 - DNA, 15 bp, Homo sapiens
taattgaccacaaca

SEQ ID NO: 2128591 - DNA, 15 bp, Homo sapiens
aattgaccacaacaa

SEQ ID NO: 2128592 - DNA, 15 bp, Homo sapiens
attgaccacaacaat

SEQ ID NO: 2128593 - DNA, 15 bp, Homo sapiens
ttgaccacaacaatg

SEQ ID NO: 2128594 - DNA, 15 bp, Homo sapiens
tgaccacaacaatgt

SEQ ID NO: 2128595 - DNA, 15 bp, Homo sapiens
gaccacaacaatgtc

SEQ ID NO: 2128596 - DNA, 15 bp, Homo sapiens
accacaacaatgtcc

SEQ ID NO: 2128597 - DNA, 15 bp, Homo sapiens
ccacaacaatgtccc

SEQ ID NO: 2128598 - DNA, 15 bp, Homo sapiens
cacaacaatgtccct

SEQ ID NO: 2128599 - DNA, 15 bp, Homo sapiens
acaacaatgtccctt

SEQ ID NO: 2128600 - DNA, 15 bp, Homo sapiens
caacaatgtcccttg

SEQ ID NO: 2128601 - DNA, 15 bp, Homo sapiens
aacaatgtcccttgg

SEQ ID NO: 2128602 - DNA, 15 bp, Homo sapiens
acaatgtcccttgga

SEQ ID NO: 2128603 - DNA, 15 bp, Homo sapiens
caatgtcccttggac

SEQ ID NO: 2128604 - DNA, 15 bp, Homo sapiens
aatgtcccttggaca

SEQ ID NO: 2128605 - DNA, 15 bp, Homo sapiens
atgtcccttggacat

SEQ ID NO: 2128606 - DNA, 15 bp, Homo sapiens
tgtcccttggacatt

SEQ ID NO: 2128607 - DNA, 15 bp, Homo sapiens
gtcccttggacatta

SEQ ID NO: 2128608 - DNA, 15 bp, Homo sapiens
tcccttggacattaa

SEQ ID NO: 2128609 - DNA, 15 bp, Homo sapiens
cccttggacattaat

SEQ ID NO: 2128610 - DNA, 15 bp, Homo sapiens
ttggacattaatgta

SEQ ID NO: 2128611 - DNA, 15 bp, Homo sapiens
tggacattaatgtat

SEQ ID NO: 2128612 - DNA, 15 bp, Homo sapiens
ggacattaatgtatg

SEQ ID NO: 2128613 - DNA, 15 bp, Homo sapiens
gacattaatgtatgt

SEQ ID NO: 2128614 - DNA, 15 bp, Homo sapiens
acattaatgtatgta

SEQ ID NO: 2128615 - DNA, 15 bp, Homo sapiens
cattaatgtatgtaa

SEQ ID NO: 2128616 - DNA, 15 bp, Homo sapiens
attaatgtatgtaat

SEQ ID NO: 2128617 - DNA, 15 bp, Homo sapiens
ttaatgtatgtaatc

SEQ ID NO: 2128618 - DNA, 15 bp, Homo sapiens
taatgtatgtaatca

SEQ ID NO: 2128619 - DNA, 15 bp, Homo sapiens
aatgtatgtaatcac

SEQ ID NO: 2128620 - DNA, 15 bp, Homo sapiens
atgtatgtaatcacc

SEQ ID NO: 2128621 - DNA, 15 bp, Homo sapiens
tgtatgtaatcacca

SEQ ID NO: 2128622 - DNA, 15 bp, Homo sapiens
gtatgtaatcaccac

SEQ ID NO: 2128623 - DNA, 15 bp, Homo sapiens
tatgtaatcaccaca

SEQ ID NO: 2128624 - DNA, 15 bp, Homo sapiens
atgtaatcaccacat

SEQ ID NO: 2128625 - DNA, 15 bp, Homo sapiens
tgtaatcaccacatg

SEQ ID NO: 2128626 - DNA, 15 bp, Homo sapiens
gtaatcaccacatgg

SEQ ID NO: 2128627 - DNA, 15 bp, Homo sapiens
taatcaccacatggt

SEQ ID NO: 2128628 - DNA, 15 bp, Homo sapiens
aatcaccacatggtt

SEQ ID NO: 2128629 - DNA, 15 bp, Homo sapiens
atcaccacatggttc

SEQ ID NO: 2128630 - DNA, 15 bp, Homo sapiens
tcaccacatggttca

SEQ ID NO: 2128631 - DNA, 15 bp, Homo sapiens
caccacatggttcat

SEQ ID NO: 2128632 - DNA, 15 bp, Homo sapiens
accacatggttcatc

SEQ ID NO: 2128633 - DNA, 15 bp, Homo sapiens
ccacatggttcatcc

SEQ ID NO: 2128634 - DNA, 15 bp, Homo sapiens
cacatggttcatcct

SEQ ID NO: 2128635 - DNA, 15 bp, Homo sapiens
acatggttcatccta

SEQ ID NO: 2128636 - DNA, 15 bp, Homo sapiens
catggttcatcctaa

SEQ ID NO: 2128637 - DNA, 15 bp, Homo sapiens
atggttcatcctaat

SEQ ID NO: 2128638 - DNA, 15 bp, Homo sapiens
tggttcatcctaatt

SEQ ID NO: 2128639 - DNA, 15 bp, Homo sapiens
ggttcatcctaatta

SEQ ID NO: 2128640 - DNA, 15 bp, Homo sapiens
gttcatcctaattaa

SEQ ID NO: 2128641 - DNA, 15 bp, Homo sapiens
ttcatcctaattaaa

SEQ ID NO: 2128642 - DNA, 15 bp, Homo sapiens
tcatcctaattaaac

SEQ ID NO: 2128643 - DNA, 15 bp, Homo sapiens
catcctaattaaaca

SEQ ID NO: 2128644 - DNA, 15 bp, Homo sapiens
atcctaattaaacaa

SEQ ID NO: 2128645 - DNA, 15 bp, Homo sapiens
tcctaattaaacaaa

SEQ ID NO: 2128646 - DNA, 15 bp, Homo sapiens
cctaattaaacaaag

SEQ ID NO: 2128647 - DNA, 15 bp, Homo sapiens
ctaattaaacaaagt

SEQ ID NO: 2128648 - DNA, 15 bp, Homo sapiens
taattaaacaaagtt

SEQ ID NO: 2128649 - DNA, 15 bp, Homo sapiens
aattaaacaaagttc

SEQ ID NO: 2128650 - DNA, 15 bp, Homo sapiens
attaaacaaagttct

SEQ ID NO: 2128651 - DNA, 15 bp, Homo sapiens
ttaaacaaagttcta

SEQ ID NO: 2128652 - DNA, 15 bp, Homo sapiens
taaacaaagttctac

SEQ ID NO: 2128653 - DNA, 15 bp, Homo sapiens
aaacaaagttctacc

SEQ ID NO: 2128654 - DNA, 15 bp, Homo sapiens
aacaaagttctacct

SEQ ID NO: 2128655 - DNA, 15 bp, Homo sapiens
acaaagttctacctt

SEQ ID NO: 2128656 - DNA, 15 bp, Homo sapiens
caaagttctaccttc

SEQ ID NO: 2128657 - DNA, 15 bp, Homo sapiens
aaagttctaccttct

SEQ ID NO: 2128658 - DNA, 15 bp, Homo sapiens
aagttctaccttctc

SEQ ID NO: 2128659 - DNA, 15 bp, Homo sapiens
agttctaccttctca

SEQ ID NO: 2128660 - DNA, 15 bp, Homo sapiens
gttctaccttctcac

SEQ ID NO: 2128661 - DNA, 15 bp, Homo sapiens
ttctaccttctcacc

SEQ ID NO: 2128662 - DNA, 15 bp, Homo sapiens
tctaccttctcaccc

SEQ ID NO: 2128663 - DNA, 15 bp, Homo sapiens
ctaccttctcaccct

SEQ ID NO: 2128664 - DNA, 15 bp, Homo sapiens
taccttctcaccctc

SEQ ID NO: 2128665 - DNA, 15 bp, Homo sapiens
accttctcaccctcc

SEQ ID NO: 2128666 - DNA, 15 bp, Homo sapiens
ccttctcaccctcca

SEQ ID NO: 2128667 - DNA, 15 bp, Homo sapiens
cttctcaccctccat

SEQ ID NO: 2128668 - DNA, 15 bp, Homo sapiens
ttctcaccctccatt

SEQ ID NO: 2128669 - DNA, 15 bp, Homo sapiens
tctcaccctccattt

SEQ ID NO: 2128670 - DNA, 15 bp, Homo sapiens
ctcaccctccatttg

SEQ ID NO: 2128671 - DNA, 15 bp, Homo sapiens
tcaccctccatttgc

SEQ ID NO: 2128672 - DNA, 15 bp, Homo sapiens
caccctccatttgca

SEQ ID NO: 2128673 - DNA, 15 bp, Homo sapiens
accctccatttgcag

SEQ ID NO: 2128674 - DNA, 15 bp, Homo sapiens
ccctccatttgcagt

SEQ ID NO: 2128675 - DNA, 15 bp, Homo sapiens
cctccatttgcagta

SEQ ID NO: 2128676 - DNA, 15 bp, Homo sapiens
ctccatttgcagtat

SEQ ID NO: 2128677 - DNA, 15 bp, Homo sapiens
tccatttgcagtata

SEQ ID NO: 2128678 - DNA, 15 bp, Homo sapiens
ccatttgcagtatac

SEQ ID NO: 2128679 - DNA, 15 bp, Homo sapiens
catttgcagtatacc

SEQ ID NO: 2128680 - DNA, 15 bp, Homo sapiens
atttgcagtatacca

SEQ ID NO: 2128681 - DNA, 15 bp, Homo sapiens
tttgcagtataccag

SEQ ID NO: 2128682 - DNA, 15 bp, Homo sapiens
ttgcagtataccagg

SEQ ID NO: 2128683 - DNA, 15 bp, Homo sapiens
tgcagtataccaggg

SEQ ID NO: 2128684 - DNA, 15 bp, Homo sapiens
gcagtataccagggt

SEQ ID NO: 2128685 - DNA, 15 bp, Homo sapiens
cagtataccagggtt

SEQ ID NO: 2128686 - DNA, 15 bp, Homo sapiens
agtataccagggttg

SEQ ID NO: 2128687 - DNA, 15 bp, Homo sapiens
gtataccagggttgc

SEQ ID NO: 2128688 - DNA, 15 bp, Homo sapiens
tataccagggttgct

SEQ ID NO: 2128689 - DNA, 15 bp, Homo sapiens
ataccagggttgctg

SEQ ID NO: 2128690 - DNA, 15 bp, Homo sapiens
taccagggttgctga

SEQ ID NO: 2128691 - DNA, 15 bp, Homo sapiens
accagggttgctgac

SEQ ID NO: 2128692 - DNA, 15 bp, Homo sapiens
ccagggttgctgacc

SEQ ID NO: 2128693 - DNA, 15 bp, Homo sapiens
cagggttgctgaccc

SEQ ID NO: 2128694 - DNA, 15 bp, Homo sapiens
agggttgctgacccc

SEQ ID NO: 2128695 - DNA, 15 bp, Homo sapiens
gggttgctgaccccc

SEQ ID NO: 2128696 - DNA, 15 bp, Homo sapiens
ggttgctgaccccct

SEQ ID NO: 2128697 - DNA, 15 bp, Homo sapiens
gttgctgacccccta

SEQ ID NO: 2128698 - DNA, 15 bp, Homo sapiens
ttgctgaccccctaa

SEQ ID NO: 2128699 - DNA, 15 bp, Homo sapiens
tgctgaccccctaag

SEQ ID NO: 2128700 - DNA, 15 bp, Homo sapiens
gctgaccccctaagt

SEQ ID NO: 2128701 - DNA, 15 bp, Homo sapiens
ctgaccccctaagtc

SEQ ID NO: 2128702 - DNA, 15 bp, Homo sapiens
tgaccccctaagtcc

SEQ ID NO: 2128703 - DNA, 15 bp, Homo sapiens
gaccccctaagtccc

SEQ ID NO: 2128704 - DNA, 15 bp, Homo sapiens
accccctaagtcccc

SEQ ID NO: 2128705 - DNA, 15 bp, Homo sapiens
ccccctaagtcccct

SEQ ID NO: 2128706 - DNA, 15 bp, Homo sapiens
ccctaagtccccttt

SEQ ID NO: 2128707 - DNA, 15 bp, Homo sapiens
cctaagtcccctttt

SEQ ID NO: 2128708 - DNA, 15 bp, Homo sapiens
ctaagtccccttttc

SEQ ID NO: 2128709 - DNA, 15 bp, Homo sapiens
taagtccccttttct

SEQ ID NO: 2128710 - DNA, 15 bp, Homo sapiens
aagtccccttttctt

SEQ ID NO: 2128711 - DNA, 15 bp, Homo sapiens
ccccttttcttggct

SEQ ID NO: 2128712 - DNA, 15 bp, Homo sapiens
cccttttcttggctt

SEQ ID NO: 2128713 - DNA, 15 bp, Homo sapiens
ccttttcttggcttg

SEQ ID NO: 2128714 - DNA, 15 bp, Homo sapiens
cttttcttggcttgt

SEQ ID NO: 2128715 - DNA, 15 bp, Homo sapiens
ttttcttggcttgtt

SEQ ID NO: 2128716 - DNA, 15 bp, Homo sapiens
tttcttggcttgttg

SEQ ID NO: 2128717 - DNA, 15 bp, Homo sapiens
ttcttggcttgttga

SEQ ID NO: 2128718 - DNA, 15 bp, Homo sapiens
tcttggcttgttgac

SEQ ID NO: 2128719 - DNA, 15 bp, Homo sapiens
cttggcttgttgaca

SEQ ID NO: 2128720 - DNA, 15 bp, Homo sapiens
ttggcttgttgacat

SEQ ID NO: 2128721 - DNA, 15 bp, Homo sapiens
tggcttgttgacatg

SEQ ID NO: 2128722 - DNA, 15 bp, Homo sapiens
ggcttgttgacatgc

SEQ ID NO: 2128723 - DNA, 15 bp, Homo sapiens
gcttgttgacatgca

SEQ ID NO: 2128724 - DNA, 15 bp, Homo sapiens
cttgttgacatgcat

SEQ ID NO: 2128725 - DNA, 15 bp, Homo sapiens
ttgttgacatgcata

SEQ ID NO: 2128726 - DNA, 15 bp, Homo sapiens
tgttgacatgcataa

SEQ ID NO: 2128727 - DNA, 15 bp, Homo sapiens
gttgacatgcataat

SEQ ID NO: 2128728 - DNA, 15 bp, Homo sapiens
ttgacatgcataatt

SEQ ID NO: 2128729 - DNA, 15 bp, Homo sapiens
tgacatgcataattg

SEQ ID NO: 2128730 - DNA, 15 bp, Homo sapiens
gacatgcataattgc

SEQ ID NO: 2128731 - DNA, 15 bp, Homo sapiens
acatgcataattgca

SEQ ID NO: 2128732 - DNA, 15 bp, Homo sapiens
catgcataattgcat

SEQ ID NO: 2128733 - DNA, 15 bp, Homo sapiens
atgcataattgcatt

SEQ ID NO: 2128734 - DNA, 15 bp, Homo sapiens
tgcataattgcattt

SEQ ID NO: 2128735 - DNA, 15 bp, Homo sapiens
gcataattgcattta

SEQ ID NO: 2128736 - DNA, 15 bp, Homo sapiens
cataattgcatttat

SEQ ID NO: 2128737 - DNA, 15 bp, Homo sapiens
ataattgcatttatg

SEQ ID NO: 2128738 - DNA, 15 bp, Homo sapiens
taattgcatttatgt

SEQ ID NO: 2128739 - DNA, 15 bp, Homo sapiens
aattgcatttatgtt

SEQ ID NO: 2128740 - DNA, 15 bp, Homo sapiens
attgcatttatgttg

SEQ ID NO: 2128741 - DNA, 15 bp, Homo sapiens
ttgcatttatgttgg

SEQ ID NO: 2128742 - DNA, 15 bp, Homo sapiens
tgcatttatgttggt

SEQ ID NO: 2128743 - DNA, 15 bp, Homo sapiens
gcatttatgttggtt

SEQ ID NO: 2128744 - DNA, 15 bp, Homo sapiens
catttatgttggttc

SEQ ID NO: 2128745 - DNA, 15 bp, Homo sapiens
atttatgttggttct

SEQ ID NO: 2128746 - DNA, 15 bp, Homo sapiens
tttatgttggttctt

SEQ ID NO: 2128747 - DNA, 15 bp, Homo sapiens
ttatgttggttcttg

SEQ ID NO: 2128748 - DNA, 15 bp, Homo sapiens
tatgttggttcttgt

SEQ ID NO: 2128749 - DNA, 15 bp, Homo sapiens
atgttggttcttgtg

SEQ ID NO: 2128750 - DNA, 15 bp, Homo sapiens
tgttggttcttgtgc

SEQ ID NO: 2128751 - DNA, 15 bp, Homo sapiens
gttggttcttgtgcc

SEQ ID NO: 2128752 - DNA, 15 bp, Homo sapiens
ttggttcttgtgccc

SEQ ID NO: 2128753 - DNA, 15 bp, Homo sapiens
tggttcttgtgccct

SEQ ID NO: 2128754 - DNA, 15 bp, Homo sapiens
ggttcttgtgcccta

SEQ ID NO: 2128755 - DNA, 15 bp, Homo sapiens
gttcttgtgccctag

SEQ ID NO: 2128756 - DNA, 15 bp, Homo sapiens
ttcttgtgccctaga

SEQ ID NO: 2128757 - DNA, 15 bp, Homo sapiens
tcttgtgccctagac

SEQ ID NO: 2128758 - DNA, 15 bp, Homo sapiens
cttgtgccctagaca

SEQ ID NO: 2128759 - DNA, 15 bp, Homo sapiens
ttgtgccctagacaa

SEQ ID NO: 2128760 - DNA, 15 bp, Homo sapiens
tgtgccctagacaag

SEQ ID NO: 2128761 - DNA, 15 bp, Homo sapiens
gtgccctagacaagg

SEQ ID NO: 2128762 - DNA, 15 bp, Homo sapiens
tgccctagacaagga

SEQ ID NO: 2128763 - DNA, 15 bp, Homo sapiens
gccctagacaaggat

SEQ ID NO: 2128764 - DNA, 15 bp, Homo sapiens
ccctagacaaggatg

SEQ ID NO: 2128765 - DNA, 15 bp, Homo sapiens
cctagacaaggatgc

SEQ ID NO: 2128766 - DNA, 15 bp, Homo sapiens
ctagacaaggatgcc

SEQ ID NO: 2128767 - DNA, 15 bp, Homo sapiens
tagacaaggatgccc

SEQ ID NO: 2128768 - DNA, 15 bp, Homo sapiens
agacaaggatgcccc

SEQ ID NO: 2128769 - DNA, 15 bp, Homo sapiens
gacaaggatgcccca

SEQ ID NO: 2128770 - DNA, 15 bp, Homo sapiens
acaaggatgccccac

SEQ ID NO: 2128771 - DNA, 15 bp, Homo sapiens
caaggatgccccacc

SEQ ID NO: 2128772 - DNA, 15 bp, Homo sapiens
aaggatgccccacct

SEQ ID NO: 2128773 - DNA, 15 bp, Homo sapiens
aggatgccccacctc

SEQ ID NO: 2128774 - DNA, 15 bp, Homo sapiens
ggatgccccacctct

SEQ ID NO: 2128775 - DNA, 15 bp, Homo sapiens
gatgccccacctctt

SEQ ID NO: 2128776 - DNA, 15 bp, Homo sapiens
atgccccacctcttt

SEQ ID NO: 2128777 - DNA, 15 bp, Homo sapiens
tgccccacctctttt

SEQ ID NO: 2128778 - DNA, 15 bp, Homo sapiens
gccccacctcttttc

SEQ ID NO: 2128779 - DNA, 15 bp, Homo sapiens
ccccacctcttttca

SEQ ID NO: 2128780 - DNA, 15 bp, Homo sapiens
cccacctcttttcaa

SEQ ID NO: 2128781 - DNA, 15 bp, Homo sapiens
ccacctcttttcaat

SEQ ID NO: 2128782 - DNA, 15 bp, Homo sapiens
cacctcttttcaata

SEQ ID NO: 2128783 - DNA, 15 bp, Homo sapiens
acctcttttcaatag

SEQ ID NO: 2128784 - DNA, 15 bp, Homo sapiens
cctcttttcaatagt

SEQ ID NO: 2128785 - DNA, 15 bp, Homo sapiens
ctcttttcaatagtg

SEQ ID NO: 2128786 - DNA, 15 bp, Homo sapiens
tcttttcaatagtgg

SEQ ID NO: 2128787 - DNA, 15 bp, Homo sapiens
cttttcaatagtggg

SEQ ID NO: 2128788 - DNA, 15 bp, Homo sapiens
ttttcaatagtgggt

SEQ ID NO: 2128789 - DNA, 15 bp, Homo sapiens
tttcaatagtgggtg

SEQ ID NO: 2128790 - DNA, 15 bp, Homo sapiens
ttcaatagtgggtgc

SEQ ID NO: 2128791 - DNA, 15 bp, Homo sapiens
tcaatagtgggtgcc

SEQ ID NO: 2128792 - DNA, 15 bp, Homo sapiens
caatagtgggtgccc

SEQ ID NO: 2128793 - DNA, 15 bp, Homo sapiens
aatagtgggtgccca

SEQ ID NO: 2128794 - DNA, 15 bp, Homo sapiens
atagtgggtgcccac

SEQ ID NO: 2128795 - DNA, 15 bp, Homo sapiens
tagtgggtgcccact

SEQ ID NO: 2128796 - DNA, 15 bp, Homo sapiens
agtgggtgcccactc

SEQ ID NO: 2128797 - DNA, 15 bp, Homo sapiens
gtgggtgcccactcc

SEQ ID NO: 2128798 - DNA, 15 bp, Homo sapiens
tgggtgcccactcct

SEQ ID NO: 2128799 - DNA, 15 bp, Homo sapiens
gggtgcccactcctt

SEQ ID NO: 2128800 - DNA, 15 bp, Homo sapiens
ggtgcccactcctta

SEQ ID NO: 2128801 - DNA, 15 bp, Homo sapiens
gtgcccactccttat

SEQ ID NO: 2128802 - DNA, 15 bp, Homo sapiens
tgcccactccttatg

SEQ ID NO: 2128803 - DNA, 15 bp, Homo sapiens
gcccactccttatga

SEQ ID NO: 2128804 - DNA, 15 bp, Homo sapiens
cccactccttatgat

SEQ ID NO: 2128805 - DNA, 15 bp, Homo sapiens
ccactccttatgatc

SEQ ID NO: 2128806 - DNA, 15 bp, Homo sapiens
cactccttatgatct

SEQ ID NO: 2128807 - DNA, 15 bp, Homo sapiens
actccttatgatctt

SEQ ID NO: 2128808 - DNA, 15 bp, Homo sapiens
ctccttatgatcttt

SEQ ID NO: 2128809 - DNA, 15 bp, Homo sapiens
tccttatgatcttta

SEQ ID NO: 2128810 - DNA, 15 bp, Homo sapiens
ccttatgatctttac

SEQ ID NO: 2128811 - DNA, 15 bp, Homo sapiens
cttatgatctttaca

SEQ ID NO: 2128812 - DNA, 15 bp, Homo sapiens
ttatgatctttacat

SEQ ID NO: 2128813 - DNA, 15 bp, Homo sapiens
tatgatctttacatt

SEQ ID NO: 2128814 - DNA, 15 bp, Homo sapiens
atgatctttacattt

SEQ ID NO: 2128815 - DNA, 15 bp, Homo sapiens
tgatctttacatttg

SEQ ID NO: 2128816 - DNA, 15 bp, Homo sapiens
gatctttacatttga

SEQ ID NO: 2128817 - DNA, 15 bp, Homo sapiens
atctttacatttgaa

SEQ ID NO: 2128818 - DNA, 15 bp, Homo sapiens
tctttacatttgaac

SEQ ID NO: 2128819 - DNA, 15 bp, Homo sapiens
ctttacatttgaaca

SEQ ID NO: 2128820 - DNA, 15 bp, Homo sapiens
tttacatttgaacag

SEQ ID NO: 2128821 - DNA, 15 bp, Homo sapiens
ttacatttgaacagt

SEQ ID NO: 2128822 - DNA, 15 bp, Homo sapiens
tacatttgaacagtt

SEQ ID NO: 2128823 - DNA, 15 bp, Homo sapiens
acatttgaacagtta

SEQ ID NO: 2128824 - DNA, 15 bp, Homo sapiens
catttgaacagttaa

SEQ ID NO: 2128825 - DNA, 15 bp, Homo sapiens
atttgaacagttaat

SEQ ID NO: 2128826 - DNA, 15 bp, Homo sapiens
tttgaacagttaatg

SEQ ID NO: 2128827 - DNA, 15 bp, Homo sapiens
ttgaacagttaatgt

SEQ ID NO: 2128828 - DNA, 15 bp, Homo sapiens
tgaacagttaatgtg

SEQ ID NO: 2128829 - DNA, 15 bp, Homo sapiens
gaacagttaatgtga

SEQ ID NO: 2128830 - DNA, 15 bp, Homo sapiens
aacagttaatgtgaa

SEQ ID NO: 2128831 - DNA, 15 bp, Homo sapiens
acagttaatgtgaat

SEQ ID NO: 2128832 - DNA, 15 bp, Homo sapiens
cagttaatgtgaata

SEQ ID NO: 2128833 - DNA, 15 bp, Homo sapiens
agttaatgtgaataa

SEQ ID NO: 2128834 - DNA, 15 bp, Homo sapiens
gttaatgtgaataat

SEQ ID NO: 2128835 - DNA, 15 bp, Homo sapiens
ttaatgtgaataatt

SEQ ID NO: 2128836 - DNA, 15 bp, Homo sapiens
taatgtgaataattg

SEQ ID NO: 2128837 - DNA, 15 bp, Homo sapiens
aatgtgaataattgc

SEQ ID NO: 2128838 - DNA, 15 bp, Homo sapiens
atgtgaataattgca

SEQ ID NO: 2128839 - DNA, 15 bp, Homo sapiens
tgtgaataattgcag

SEQ ID NO: 2128840 - DNA, 15 bp, Homo sapiens
gtgaataattgcagt

SEQ ID NO: 2128841 - DNA, 15 bp, Homo sapiens
tgaataattgcagtt

SEQ ID NO: 2128842 - DNA, 15 bp, Homo sapiens
gaataattgcagttg

SEQ ID NO: 2128843 - DNA, 15 bp, Homo sapiens
aataattgcagttgt

SEQ ID NO: 2128844 - DNA, 15 bp, Homo sapiens
ataattgcagttgtc

SEQ ID NO: 2128845 - DNA, 15 bp, Homo sapiens
taattgcagttgtcc

SEQ ID NO: 2128846 - DNA, 15 bp, Homo sapiens
aattgcagttgtcca

SEQ ID NO: 2128847 - DNA, 15 bp, Homo sapiens
attgcagttgtccac

SEQ ID NO: 2128848 - DNA, 15 bp, Homo sapiens
ttgcagttgtccaca

SEQ ID NO: 2128849 - DNA, 15 bp, Homo sapiens
tgcagttgtccacaa

SEQ ID NO: 2128850 - DNA, 15 bp, Homo sapiens
gcagttgtccacaac

SEQ ID NO: 2128851 - DNA, 15 bp, Homo sapiens
cagttgtccacaacc

SEQ ID NO: 2128852 - DNA, 15 bp, Homo sapiens
agttgtccacaaccc

SEQ ID NO: 2128853 - DNA, 15 bp, Homo sapiens
gttgtccacaaccct

SEQ ID NO: 2128854 - DNA, 15 bp, Homo sapiens
ttgtccacaacccta

SEQ ID NO: 2128855 - DNA, 15 bp, Homo sapiens
tgtccacaaccctat

SEQ ID NO: 2128856 - DNA, 15 bp, Homo sapiens
gtccacaaccctatc

SEQ ID NO: 2128857 - DNA, 15 bp, Homo sapiens
tccacaaccctatca

SEQ ID NO: 2128858 - DNA, 15 bp, Homo sapiens
ccacaaccctatcac

SEQ ID NO: 2128859 - DNA, 15 bp, Homo sapiens
cacaaccctatcact

SEQ ID NO: 2128860 - DNA, 15 bp, Homo sapiens
acaaccctatcactt

SEQ ID NO: 2128861 - DNA, 15 bp, Homo sapiens
caaccctatcacttc

SEQ ID NO: 2128862 - DNA, 15 bp, Homo sapiens
aaccctatcacttct

SEQ ID NO: 2128863 - DNA, 15 bp, Homo sapiens
accctatcacttcta

SEQ ID NO: 2128864 - DNA, 15 bp, Homo sapiens
ccctatcacttctag

SEQ ID NO: 2128865 - DNA, 15 bp, Homo sapiens
cctatcacttctagg

SEQ ID NO: 2128866 - DNA, 15 bp, Homo sapiens
ctatcacttctagga

SEQ ID NO: 2128867 - DNA, 15 bp, Homo sapiens
tatcacttctaggac

SEQ ID NO: 2128868 - DNA, 15 bp, Homo sapiens
atcacttctaggacc

SEQ ID NO: 2128869 - DNA, 15 bp, Homo sapiens
tcacttctaggacca

SEQ ID NO: 2128870 - DNA, 15 bp, Homo sapiens
cacttctaggaccat

SEQ ID NO: 2128871 - DNA, 15 bp, Homo sapiens
acttctaggaccatt

SEQ ID NO: 2128872 - DNA, 15 bp, Homo sapiens
cttctaggaccatta

SEQ ID NO: 2128873 - DNA, 15 bp, Homo sapiens
ttctaggaccattat

SEQ ID NO: 2128874 - DNA, 15 bp, Homo sapiens
tctaggaccattata

SEQ ID NO: 2128875 - DNA, 15 bp, Homo sapiens
ctaggaccattatac

SEQ ID NO: 2128876 - DNA, 15 bp, Homo sapiens
taggaccattatacc

SEQ ID NO: 2128877 - DNA, 15 bp, Homo sapiens
aggaccattatacct

SEQ ID NO: 2128878 - DNA, 15 bp, Homo sapiens
ggaccattatacctc

SEQ ID NO: 2128879 - DNA, 15 bp, Homo sapiens
gaccattatacctct

SEQ ID NO: 2128880 - DNA, 15 bp, Homo sapiens
accattatacctctt

SEQ ID NO: 2128881 - DNA, 15 bp, Homo sapiens
ccattatacctcttt

SEQ ID NO: 2128882 - DNA, 15 bp, Homo sapiens
cattatacctctttt

SEQ ID NO: 2128883 - DNA, 15 bp, Homo sapiens
attatacctcttttg

SEQ ID NO: 2128884 - DNA, 15 bp, Homo sapiens
ttatacctcttttgc

SEQ ID NO: 2128885 - DNA, 15 bp, Homo sapiens
tatacctcttttgca

SEQ ID NO: 2128886 - DNA, 15 bp, Homo sapiens
atacctcttttgcat

SEQ ID NO: 2128887 - DNA, 15 bp, Homo sapiens
tacctcttttgcatt

SEQ ID NO: 2128888 - DNA, 15 bp, Homo sapiens
acctcttttgcatta

SEQ ID NO: 2128889 - DNA, 15 bp, Homo sapiens
cctcttttgcattac

SEQ ID NO: 2128890 - DNA, 15 bp, Homo sapiens
ctcttttgcattact

SEQ ID NO: 2128891 - DNA, 15 bp, Homo sapiens
tcttttgcattactg

SEQ ID NO: 2128892 - DNA, 15 bp, Homo sapiens
cttttgcattactgt

SEQ ID NO: 2128893 - DNA, 15 bp, Homo sapiens
ttttgcattactgtg

SEQ ID NO: 2128894 - DNA, 15 bp, Homo sapiens
tttgcattactgtgg

SEQ ID NO: 2128895 - DNA, 15 bp, Homo sapiens
ttgcattactgtggg

SEQ ID NO: 2128896 - DNA, 15 bp, Homo sapiens
tgcattactgtgggg

SEQ ID NO: 2128897 - DNA, 15 bp, Homo sapiens
gcattactgtggggt

SEQ ID NO: 2128898 - DNA, 15 bp, Homo sapiens
cattactgtggggta

SEQ ID NO: 2128899 - DNA, 15 bp, Homo sapiens
attactgtggggtat

SEQ ID NO: 2128900 - DNA, 15 bp, Homo sapiens
ttactgtggggtata

SEQ ID NO: 2128901 - DNA, 15 bp, Homo sapiens
tactgtggggtatac

SEQ ID NO: 2128902 - DNA, 15 bp, Homo sapiens
actgtggggtatact

SEQ ID NO: 2128903 - DNA, 15 bp, Homo sapiens
ctgtggggtatactg

SEQ ID NO: 2128904 - DNA, 15 bp, Homo sapiens
tgtggggtatactgt

SEQ ID NO: 2128905 - DNA, 15 bp, Homo sapiens
gtggggtatactgtt

SEQ ID NO: 2128906 - DNA, 15 bp, Homo sapiens
tggggtatactgttt

SEQ ID NO: 2128907 - DNA, 15 bp, Homo sapiens
ggggtatactgtttc

SEQ ID NO: 2128908 - DNA, 15 bp, Homo sapiens
gggtatactgtttcc

SEQ ID NO: 2128909 - DNA, 15 bp, Homo sapiens
ggtatactgtttccc

SEQ ID NO: 2128910 - DNA, 15 bp, Homo sapiens
gtatactgtttccct

SEQ ID NO: 2128911 - DNA, 15 bp, Homo sapiens
tatactgtttccctc

SEQ ID NO: 2128912 - DNA, 15 bp, Homo sapiens
atactgtttccctcc

SEQ ID NO: 2128913 - DNA, 15 bp, Homo sapiens
tactgtttccctcca

SEQ ID NO: 2128914 - DNA, 15 bp, Homo sapiens
actgtttccctccaa

SEQ ID NO: 2128915 - DNA, 15 bp, Homo sapiens
ctgtttccctccaag

SEQ ID NO: 2128916 - DNA, 15 bp, Homo sapiens
tgtttccctccaagg

SEQ ID NO: 2128917 - DNA, 15 bp, Homo sapiens
gtttccctccaaggc

SEQ ID NO: 2128918 - DNA, 15 bp, Homo sapiens
tttccctccaaggcc

SEQ ID NO: 2128919 - DNA, 15 bp, Homo sapiens
ttccctccaaggccc

SEQ ID NO: 2128920 - DNA, 15 bp, Homo sapiens
tccctccaaggcccc

SEQ ID NO: 2128921 - DNA, 15 bp, Homo sapiens
ccctccaaggcccct

SEQ ID NO: 2128922 - DNA, 15 bp, Homo sapiens
cctccaaggcccctt

SEQ ID NO: 2128923 - DNA, 15 bp, Homo sapiens
ctccaaggccccttc

SEQ ID NO: 2128924 - DNA, 15 bp, Homo sapiens
tccaaggccccttct

SEQ ID NO: 2128925 - DNA, 15 bp, Homo sapiens
ccaaggccccttctg

SEQ ID NO: 2128926 - DNA, 15 bp, Homo sapiens
caaggccccttctgg

SEQ ID NO: 2128927 - DNA, 15 bp, Homo sapiens
aaggccccttctggt

SEQ ID NO: 2128928 - DNA, 15 bp, Homo sapiens
aggccccttctggtg

SEQ ID NO: 2128929 - DNA, 15 bp, Homo sapiens
ggccccttctggtgg

SEQ ID NO: 2128930 - DNA, 15 bp, Homo sapiens
gccccttctggtgga

SEQ ID NO: 2128931 - DNA, 15 bp, Homo sapiens
ccccttctggtggac

SEQ ID NO: 2128932 - DNA, 15 bp, Homo sapiens
cccttctggtggact

SEQ ID NO: 2128933 - DNA, 15 bp, Homo sapiens
ccttctggtggacta

SEQ ID NO: 2128934 - DNA, 15 bp, Homo sapiens
cttctggtggactat

SEQ ID NO: 2128935 - DNA, 15 bp, Homo sapiens
ttctggtggactatc

SEQ ID NO: 2128936 - DNA, 15 bp, Homo sapiens
tctggtggactatca

SEQ ID NO: 2128937 - DNA, 15 bp, Homo sapiens
ctggtggactatcaa

SEQ ID NO: 2128938 - DNA, 15 bp, Homo sapiens
tggtggactatcaac

SEQ ID NO: 2128939 - DNA, 15 bp, Homo sapiens
ggtggactatcaaca

SEQ ID NO: 2128940 - DNA, 15 bp, Homo sapiens
gtggactatcaacat

SEQ ID NO: 2128941 - DNA, 15 bp, Homo sapiens
tggactatcaacata

SEQ ID NO: 2128942 - DNA, 15 bp, Homo sapiens
ggactatcaacatat

SEQ ID NO: 2128943 - DNA, 15 bp, Homo sapiens
gactatcaacatata

SEQ ID NO: 2128944 - DNA, 15 bp, Homo sapiens
actatcaacatataa

SEQ ID NO: 2128945 - DNA, 15 bp, Homo sapiens
ctatcaacatataat

SEQ ID NO: 2128946 - DNA, 15 bp, Homo sapiens
tatcaacatataatt

SEQ ID NO: 2128947 - DNA, 15 bp, Homo sapiens
atcaacatataattg

SEQ ID NO: 2128948 - DNA, 15 bp, Homo sapiens
tcaacatataattga

SEQ ID NO: 2128949 - DNA, 15 bp, Homo sapiens
caacatataattgaa

SEQ ID NO: 2128950 - DNA, 15 bp, Homo sapiens
aacatataattgaaa

SEQ ID NO: 2128951 - DNA, 15 bp, Homo sapiens
acatataattgaaat

SEQ ID NO: 2128952 - DNA, 15 bp, Homo sapiens
catataattgaaatt

SEQ ID NO: 2128953 - DNA, 15 bp, Homo sapiens
atataattgaaattt

SEQ ID NO: 2128954 - DNA, 15 bp, Homo sapiens
tataattgaaatttt

SEQ ID NO: 2128955 - DNA, 15 bp, Homo sapiens
ataattgaaattttc

SEQ ID NO: 2128956 - DNA, 15 bp, Homo sapiens
taattgaaattttct

SEQ ID NO: 2128957 - DNA, 15 bp, Homo sapiens
aattgaaattttctt

SEQ ID NO: 2128958 - DNA, 15 bp, Homo sapiens
attgaaattttcttt

SEQ ID NO: 2128959 - DNA, 15 bp, Homo sapiens
ttgaaattttctttt

SEQ ID NO: 2128960 - DNA, 15 bp, Homo sapiens
tgaaattttcttttg

SEQ ID NO: 2128961 - DNA, 15 bp, Homo sapiens
gaaattttcttttgt

SEQ ID NO: 2128962 - DNA, 15 bp, Homo sapiens
aaattttcttttgtc

SEQ ID NO: 2128963 - DNA, 15 bp, Homo sapiens
aattttcttttgtct

SEQ ID NO: 2128964 - DNA, 15 bp, Homo sapiens
attttcttttgtctt

SEQ ID NO: 2128965 - DNA, 15 bp, Homo sapiens
ttttcttttgtcttt

SEQ ID NO: 2128966 - DNA, 15 bp, Homo sapiens
tttcttttgtctttg

SEQ ID NO: 2128967 - DNA, 15 bp, Homo sapiens
ttcttttgtctttgt

SEQ ID NO: 2128968 - DNA, 15 bp, Homo sapiens
tcttttgtctttgtc

SEQ ID NO: 2128969 - DNA, 15 bp, Homo sapiens
cttttgtctttgtca

SEQ ID NO: 2128970 - DNA, 15 bp, Homo sapiens
ttttgtctttgtcag

SEQ ID NO: 2128971 - DNA, 15 bp, Homo sapiens
tttgtctttgtcagt

SEQ ID NO: 2128972 - DNA, 15 bp, Homo sapiens
ttgtctttgtcagta

SEQ ID NO: 2128973 - DNA, 15 bp, Homo sapiens
tgtctttgtcagtag

SEQ ID NO: 2128974 - DNA, 15 bp, Homo sapiens
gtctttgtcagtaga

SEQ ID NO: 2128975 - DNA, 15 bp, Homo sapiens
tctttgtcagtagat

SEQ ID NO: 2128976 - DNA, 15 bp, Homo sapiens
ctttgtcagtagatt

SEQ ID NO: 2128977 - DNA, 15 bp, Homo sapiens
tttgtcagtagatta

SEQ ID NO: 2128978 - DNA, 15 bp, Homo sapiens
ttgtcagtagattaa

SEQ ID NO: 2128979 - DNA, 15 bp, Homo sapiens
tgtcagtagattaag

SEQ ID NO: 2128980 - DNA, 15 bp, Homo sapiens
gtcagtagattaagg

SEQ ID NO: 2128981 - DNA, 15 bp, Homo sapiens
tcagtagattaaggt

SEQ ID NO: 2128982 - DNA, 15 bp, Homo sapiens
cagtagattaaggtc

SEQ ID NO: 2128983 - DNA, 15 bp, Homo sapiens
agtagattaaggtca

SEQ ID NO: 2128984 - DNA, 15 bp, Homo sapiens
gtagattaaggtcat

SEQ ID NO: 2128985 - DNA, 15 bp, Homo sapiens
tagattaaggtcata

SEQ ID NO: 2128986 - DNA, 15 bp, Homo sapiens
agattaaggtcatac

SEQ ID NO: 2128987 - DNA, 15 bp, Homo sapiens
gattaaggtcatacc

SEQ ID NO: 2128988 - DNA, 15 bp, Homo sapiens
attaaggtcataccc

SEQ ID NO: 2128989 - DNA, 15 bp, Homo sapiens
ttaaggtcatacccc

SEQ ID NO: 2128990 - DNA, 15 bp, Homo sapiens
taaggtcatacccca

SEQ ID NO: 2128991 - DNA, 15 bp, Homo sapiens
aaggtcataccccat

SEQ ID NO: 2128992 - DNA, 15 bp, Homo sapiens
aggtcataccccatc

SEQ ID NO: 2128993 - DNA, 15 bp, Homo sapiens
ggtcataccccatca

SEQ ID NO: 2128994 - DNA, 15 bp, Homo sapiens
gtcataccccatcac

SEQ ID NO: 2128995 - DNA, 15 bp, Homo sapiens
tcataccccatcacc

SEQ ID NO: 2128996 - DNA, 15 bp, Homo sapiens
cataccccatcacct

SEQ ID NO: 2128997 - DNA, 15 bp, Homo sapiens
ataccccatcacctt

SEQ ID NO: 2128998 - DNA, 15 bp, Homo sapiens
taccccatcaccttt

SEQ ID NO: 2128999 - DNA, 15 bp, Homo sapiens
accccatcacctttc

SEQ ID NO: 2129000 - DNA, 15 bp, Homo sapiens
ccccatcacctttcc

SEQ ID NO: 2129001 - DNA, 15 bp, Homo sapiens
cccatcacctttcct

SEQ ID NO: 2129002 - DNA, 15 bp, Homo sapiens
ccatcacctttcctt

SEQ ID NO: 2129003 - DNA, 15 bp, Homo sapiens
catcacctttccttt

SEQ ID NO: 2129004 - DNA, 15 bp, Homo sapiens
atcacctttcctttg

SEQ ID NO: 2129005 - DNA, 15 bp, Homo sapiens
tcacctttcctttgt

SEQ ID NO: 2129006 - DNA, 15 bp, Homo sapiens
cacctttcctttgta

SEQ ID NO: 2129007 - DNA, 15 bp, Homo sapiens
acctttcctttgtag

SEQ ID NO: 2129008 - DNA, 15 bp, Homo sapiens
cctttcctttgtagt

SEQ ID NO: 2129009 - DNA, 15 bp, Homo sapiens
ctttcctttgtagta

SEQ ID NO: 2129010 - DNA, 15 bp, Homo sapiens
tttcctttgtagtac

SEQ ID NO: 2129011 - DNA, 15 bp, Homo sapiens
ttcctttgtagtaca

SEQ ID NO: 2129012 - DNA, 15 bp, Homo sapiens
tcctttgtagtacaa

SEQ ID NO: 2129013 - DNA, 15 bp, Homo sapiens
cctttgtagtacaac

SEQ ID NO: 2129014 - DNA, 15 bp, Homo sapiens
ctttgtagtacaaca

SEQ ID NO: 2129015 - DNA, 15 bp, Homo sapiens
tttgtagtacaacag

SEQ ID NO: 2129016 - DNA, 15 bp, Homo sapiens
ttgtagtacaacagg

SEQ ID NO: 2129017 - DNA, 15 bp, Homo sapiens
tgtagtacaacaggg

SEQ ID NO: 2129018 - DNA, 15 bp, Homo sapiens
gtagtacaacagggt

SEQ ID NO: 2129019 - DNA, 15 bp, Homo sapiens
tagtacaacagggtg

SEQ ID NO: 2129020 - DNA, 15 bp, Homo sapiens
agtacaacagggtgt

SEQ ID NO: 2129021 - DNA, 15 bp, Homo sapiens
gtacaacagggtgtc

SEQ ID NO: 2129022 - DNA, 15 bp, Homo sapiens
tacaacagggtgtcc

SEQ ID NO: 2129023 - DNA, 15 bp, Homo sapiens
acaacagggtgtcct

SEQ ID NO: 2129024 - DNA, 15 bp, Homo sapiens
caacagggtgtcctg

SEQ ID NO: 2129025 - DNA, 15 bp, Homo sapiens
aacagggtgtcctga

SEQ ID NO: 2129026 - DNA, 15 bp, Homo sapiens
acagggtgtcctgat

SEQ ID NO: 2129027 - DNA, 15 bp, Homo sapiens
cagggtgtcctgatc

SEQ ID NO: 2129028 - DNA, 15 bp, Homo sapiens
agggtgtcctgatca

SEQ ID NO: 2129029 - DNA, 15 bp, Homo sapiens
gggtgtcctgatcaa

SEQ ID NO: 2129030 - DNA, 15 bp, Homo sapiens
ggtgtcctgatcaac

SEQ ID NO: 2129031 - DNA, 15 bp, Homo sapiens
gtgtcctgatcaacc

SEQ ID NO: 2129032 - DNA, 15 bp, Homo sapiens
tgtcctgatcaacca

SEQ ID NO: 2129033 - DNA, 15 bp, Homo sapiens
gtcctgatcaaccaa

SEQ ID NO: 2129034 - DNA, 15 bp, Homo sapiens
tcctgatcaaccaaa

SEQ ID NO: 2129035 - DNA, 15 bp, Homo sapiens
cctgatcaaccaaag

SEQ ID NO: 2129036 - DNA, 15 bp, Homo sapiens
ctgatcaaccaaagt

SEQ ID NO: 2129037 - DNA, 15 bp, Homo sapiens
tgatcaaccaaagtc

SEQ ID NO: 2129038 - DNA, 15 bp, Homo sapiens
gatcaaccaaagtcc

SEQ ID NO: 2129039 - DNA, 15 bp, Homo sapiens
atcaaccaaagtcct

SEQ ID NO: 2129040 - DNA, 15 bp, Homo sapiens
tcaaccaaagtcctg

SEQ ID NO: 2129041 - DNA, 15 bp, Homo sapiens
caaccaaagtcctgt

SEQ ID NO: 2129042 - DNA, 15 bp, Homo sapiens
aaccaaagtcctgtt

SEQ ID NO: 2129043 - DNA, 15 bp, Homo sapiens
accaaagtcctgttg

SEQ ID NO: 2129044 - DNA, 15 bp, Homo sapiens
ccaaagtcctgttgt

SEQ ID NO: 2129045 - DNA, 15 bp, Homo sapiens
caaagtcctgttgtt

SEQ ID NO: 2129046 - DNA, 15 bp, Homo sapiens
aaagtcctgttgttt

SEQ ID NO: 2129047 - DNA, 15 bp, Homo sapiens
aagtcctgttgtttt

SEQ ID NO: 2129048 - DNA, 15 bp, Homo sapiens
agtcctgttgttttg

SEQ ID NO: 2129049 - DNA, 15 bp, Homo sapiens
gtcctgttgttttgg

SEQ ID NO: 2129050 - DNA, 15 bp, Homo sapiens
tcctgttgttttgga

SEQ ID NO: 2129051 - DNA, 15 bp, Homo sapiens
cctgttgttttggac

SEQ ID NO: 2129052 - DNA, 15 bp, Homo sapiens
ctgttgttttggact

SEQ ID NO: 2129053 - DNA, 15 bp, Homo sapiens
tgttgttttggactg

SEQ ID NO: 2129054 - DNA, 15 bp, Homo sapiens
gttgttttggactgt

SEQ ID NO: 2129055 - DNA, 15 bp, Homo sapiens
ttgttttggactgtt

SEQ ID NO: 2129056 - DNA, 15 bp, Homo sapiens
tgttttggactgtta

SEQ ID NO: 2129057 - DNA, 15 bp, Homo sapiens
gttttggactgttaa

SEQ ID NO: 2129058 - DNA, 15 bp, Homo sapiens
ttttggactgttaat

SEQ ID NO: 2129059 - DNA, 15 bp, Homo sapiens
tttggactgttaata

SEQ ID NO: 2129060 - DNA, 15 bp, Homo sapiens
ttggactgttaatat

SEQ ID NO: 2129061 - DNA, 15 bp, Homo sapiens
tggactgttaatatg

SEQ ID NO: 2129062 - DNA, 15 bp, Homo sapiens
ggactgttaatatgt

SEQ ID NO: 2129063 - DNA, 15 bp, Homo sapiens
gactgttaatatgtg

SEQ ID NO: 2129064 - DNA, 15 bp, Homo sapiens
actgttaatatgtgc

SEQ ID NO: 2129065 - DNA, 15 bp, Homo sapiens
ctgttaatatgtgca

SEQ ID NO: 2129066 - DNA, 15 bp, Homo sapiens
tgttaatatgtgcaa

SEQ ID NO: 2129067 - DNA, 15 bp, Homo sapiens
gttaatatgtgcaat

SEQ ID NO: 2129068 - DNA, 15 bp, Homo sapiens
ttaatatgtgcaatt

SEQ ID NO: 2129069 - DNA, 15 bp, Homo sapiens
taatatgtgcaatta

SEQ ID NO: 2129070 - DNA, 15 bp, Homo sapiens
aatatgtgcaattac

SEQ ID NO: 2129071 - DNA, 15 bp, Homo sapiens
atatgtgcaattaca

SEQ ID NO: 2129072 - DNA, 15 bp, Homo sapiens
tatgtgcaattacat

SEQ ID NO: 2129073 - DNA, 15 bp, Homo sapiens
atgtgcaattacatt

SEQ ID NO: 2129074 - DNA, 15 bp, Homo sapiens
tgtgcaattacattt

SEQ ID NO: 2129075 - DNA, 15 bp, Homo sapiens
gtgcaattacatttg

SEQ ID NO: 2129076 - DNA, 15 bp, Homo sapiens
tgcaattacatttgc

SEQ ID NO: 2129077 - DNA, 15 bp, Homo sapiens
gcaattacatttgct

SEQ ID NO: 2129078 - DNA, 15 bp, Homo sapiens
caattacatttgctc

SEQ ID NO: 2129079 - DNA, 15 bp, Homo sapiens
aattacatttgctcc

SEQ ID NO: 2129080 - DNA, 15 bp, Homo sapiens
attacatttgctcct

SEQ ID NO: 2129081 - DNA, 15 bp, Homo sapiens
ttacatttgctcctg

SEQ ID NO: 2129082 - DNA, 15 bp, Homo sapiens
tacatttgctcctga

SEQ ID NO: 2129083 - DNA, 15 bp, Homo sapiens
acatttgctcctgat

SEQ ID NO: 2129084 - DNA, 15 bp, Homo sapiens
catttgctcctgatc

SEQ ID NO: 2129085 - DNA, 15 bp, Homo sapiens
atttgctcctgatct

SEQ ID NO: 2129086 - DNA, 15 bp, Homo sapiens
tttgctcctgatctg

SEQ ID NO: 2129087 - DNA, 15 bp, Homo sapiens
ttgctcctgatctgt

SEQ ID NO: 2129088 - DNA, 15 bp, Homo sapiens
tgctcctgatctgtg

SEQ ID NO: 2129089 - DNA, 15 bp, Homo sapiens
gctcctgatctgtgc

SEQ ID NO: 2129090 - DNA, 15 bp, Homo sapiens
ctcctgatctgtgca

SEQ ID NO: 2129091 - DNA, 15 bp, Homo sapiens
tcctgatctgtgcac

SEQ ID NO: 2129092 - DNA, 15 bp, Homo sapiens
cctgatctgtgcact

SEQ ID NO: 2129093 - DNA, 15 bp, Homo sapiens
ctgatctgtgcacta

SEQ ID NO: 2129094 - DNA, 15 bp, Homo sapiens
tgatctgtgcactag

SEQ ID NO: 2129095 - DNA, 15 bp, Homo sapiens
gatctgtgcactaga

SEQ ID NO: 2129096 - DNA, 15 bp, Homo sapiens
atctgtgcactagat

SEQ ID NO: 2129097 - DNA, 15 bp, Homo sapiens
tctgtgcactagata

SEQ ID NO: 2129098 - DNA, 15 bp, Homo sapiens
ctgtgcactagataa

SEQ ID NO: 2129099 - DNA, 15 bp, Homo sapiens
tgtgcactagataag

SEQ ID NO: 2129100 - DNA, 15 bp, Homo sapiens
gtgcactagataagg

SEQ ID NO: 2129101 - DNA, 15 bp, Homo sapiens
tgcactagataagga

SEQ ID NO: 2129102 - DNA, 15 bp, Homo sapiens
gcactagataaggat

SEQ ID NO: 2129103 - DNA, 15 bp, Homo sapiens
cactagataaggatc

SEQ ID NO: 2129104 - DNA, 15 bp, Homo sapiens
actagataaggatcc

SEQ ID NO: 2129105 - DNA, 15 bp, Homo sapiens
ctagataaggatcct

SEQ ID NO: 2129106 - DNA, 15 bp, Homo sapiens
tagataaggatccta

SEQ ID NO: 2129107 - DNA, 15 bp, Homo sapiens
agataaggatcctac

SEQ ID NO: 2129108 - DNA, 15 bp, Homo sapiens
gataaggatcctacc

SEQ ID NO: 2129109 - DNA, 15 bp, Homo sapiens
ataaggatcctacct

SEQ ID NO: 2129110 - DNA, 15 bp, Homo sapiens
taaggatcctaccta

SEQ ID NO: 2129111 - DNA, 15 bp, Homo sapiens
aaggatcctacctac

SEQ ID NO: 2129112 - DNA, 15 bp, Homo sapiens
aggatcctacctact

SEQ ID NO: 2129113 - DNA, 15 bp, Homo sapiens
ggatcctacctactt

SEQ ID NO: 2129114 - DNA, 15 bp, Homo sapiens
gatcctacctacttt

SEQ ID NO: 2129115 - DNA, 15 bp, Homo sapiens
atcctacctactttc

SEQ ID NO: 2129116 - DNA, 15 bp, Homo sapiens
tcctacctactttct

SEQ ID NO: 2129117 - DNA, 15 bp, Homo sapiens
cctacctactttctt

SEQ ID NO: 2129118 - DNA, 15 bp, Homo sapiens
ctacctactttctta

SEQ ID NO: 2129119 - DNA, 15 bp, Homo sapiens
tacctactttcttag

SEQ ID NO: 2129120 - DNA, 15 bp, Homo sapiens
acctactttcttagt

SEQ ID NO: 2129121 - DNA, 15 bp, Homo sapiens
cctactttcttagtg

SEQ ID NO: 2129122 - DNA, 15 bp, Homo sapiens
ctactttcttagtgt

SEQ ID NO: 2129123 - DNA, 15 bp, Homo sapiens
tactttcttagtgtt

SEQ ID NO: 2129124 - DNA, 15 bp, Homo sapiens
actttcttagtgttt

SEQ ID NO: 2129125 - DNA, 15 bp, Homo sapiens
ctttcttagtgtttt

SEQ ID NO: 2129126 - DNA, 15 bp, Homo sapiens
tttcttagtgttttt

SEQ ID NO: 2129127 - DNA, 15 bp, Homo sapiens
ttcttagtgttttta

SEQ ID NO: 2129128 - DNA, 15 bp, Homo sapiens
tcttagtgtttttag

SEQ ID NO: 2129129 - DNA, 15 bp, Homo sapiens
cttagtgtttttagc

SEQ ID NO: 2129130 - DNA, 15 bp, Homo sapiens
ttagtgtttttagca

SEQ ID NO: 2129131 - DNA, 15 bp, Homo sapiens
tagtgtttttagcag

SEQ ID NO: 2129132 - DNA, 15 bp, Homo sapiens
agtgtttttagcagg

SEQ ID NO: 2129133 - DNA, 15 bp, Homo sapiens
gtgtttttagcaggt

SEQ ID NO: 2129134 - DNA, 15 bp, Homo sapiens
tgtttttagcaggta

SEQ ID NO: 2129135 - DNA, 15 bp, Homo sapiens
gtttttagcaggtag

SEQ ID NO: 2129136 - DNA, 15 bp, Homo sapiens
tttttagcaggtagt

SEQ ID NO: 2129137 - DNA, 15 bp, Homo sapiens
ttttagcaggtagtg

SEQ ID NO: 2129138 - DNA, 15 bp, Homo sapiens
tttagcaggtagtgc

SEQ ID NO: 2129139 - DNA, 15 bp, Homo sapiens
ttagcaggtagtgcc

SEQ ID NO: 2129140 - DNA, 15 bp, Homo sapiens
tagcaggtagtgccc

SEQ ID NO: 2129141 - DNA, 15 bp, Homo sapiens
agcaggtagtgccca

SEQ ID NO: 2129142 - DNA, 15 bp, Homo sapiens
gcaggtagtgcccac

SEQ ID NO: 2129143 - DNA, 15 bp, Homo sapiens
caggtagtgcccact

SEQ ID NO: 2129144 - DNA, 15 bp, Homo sapiens
aggtagtgcccacta

SEQ ID NO: 2129145 - DNA, 15 bp, Homo sapiens
ggtagtgcccactac

SEQ ID NO: 2129146 - DNA, 15 bp, Homo sapiens
gtagtgcccactact

SEQ ID NO: 2129147 - DNA, 15 bp, Homo sapiens
tagtgcccactactc

SEQ ID NO: 2129148 - DNA, 15 bp, Homo sapiens
agtgcccactactca

SEQ ID NO: 2129149 - DNA, 15 bp, Homo sapiens
gtgcccactactcaa

SEQ ID NO: 2129150 - DNA, 15 bp, Homo sapiens
tgcccactactcaag

SEQ ID NO: 2129151 - DNA, 15 bp, Homo sapiens
gcccactactcaaga

SEQ ID NO: 2129152 - DNA, 15 bp, Homo sapiens
cccactactcaagac

SEQ ID NO: 2129153 - DNA, 15 bp, Homo sapiens
ccactactcaagact

SEQ ID NO: 2129154 - DNA, 15 bp, Homo sapiens
cactactcaagactg

SEQ ID NO: 2129155 - DNA, 15 bp, Homo sapiens
actactcaagactgt

SEQ ID NO: 2129156 - DNA, 15 bp, Homo sapiens
ctactcaagactgtc

SEQ ID NO: 2129157 - DNA, 15 bp, Homo sapiens
tactcaagactgtca

SEQ ID NO: 2129158 - DNA, 15 bp, Homo sapiens
actcaagactgtcac

SEQ ID NO: 2129159 - DNA, 15 bp, Homo sapiens
ctcaagactgtcact

SEQ ID NO: 2129160 - DNA, 15 bp, Homo sapiens
tcaagactgtcactt

SEQ ID NO: 2129161 - DNA, 15 bp, Homo sapiens
caagactgtcacttg

SEQ ID NO: 2129162 - DNA, 15 bp, Homo sapiens
aagactgtcacttgg

SEQ ID NO: 2129163 - DNA, 15 bp, Homo sapiens
agactgtcacttgga

SEQ ID NO: 2129164 - DNA, 15 bp, Homo sapiens
gactgtcacttggaa

SEQ ID NO: 2129165 - DNA, 15 bp, Homo sapiens
actgtcacttggaat

SEQ ID NO: 2129166 - DNA, 15 bp, Homo sapiens
ctgtcacttggaatg

SEQ ID NO: 2129167 - DNA, 15 bp, Homo sapiens
tgtcacttggaatgt

SEQ ID NO: 2129168 - DNA, 15 bp, Homo sapiens
gtcacttggaatgtt

SEQ ID NO: 2129169 - DNA, 15 bp, Homo sapiens
tcacttggaatgttc

SEQ ID NO: 2129170 - DNA, 15 bp, Homo sapiens
cacttggaatgttca

SEQ ID NO: 2129171 - DNA, 15 bp, Homo sapiens
acttggaatgttcat

SEQ ID NO: 2129172 - DNA, 15 bp, Homo sapiens
cttggaatgttcatg

SEQ ID NO: 2129173 - DNA, 15 bp, Homo sapiens
ttggaatgttcatgt

SEQ ID NO: 2129174 - DNA, 15 bp, Homo sapiens
tggaatgttcatgtg

SEQ ID NO: 2129175 - DNA, 15 bp, Homo sapiens
ggaatgttcatgtgc

SEQ ID NO: 2129176 - DNA, 15 bp, Homo sapiens
gaatgttcatgtgca

SEQ ID NO: 2129177 - DNA, 15 bp, Homo sapiens
aatgttcatgtgcac

SEQ ID NO: 2129178 - DNA, 15 bp, Homo sapiens
atgttcatgtgcaca

SEQ ID NO: 2129179 - DNA, 15 bp, Homo sapiens
tgttcatgtgcacaa

SEQ ID NO: 2129180 - DNA, 15 bp, Homo sapiens
gttcatgtgcacaaa

SEQ ID NO: 2129181 - DNA, 15 bp, Homo sapiens
ttcatgtgcacaaac

SEQ ID NO: 2129182 - DNA, 15 bp, Homo sapiens
tcatgtgcacaaact

SEQ ID NO: 2129183 - DNA, 15 bp, Homo sapiens
catgtgcacaaactc

SEQ ID NO: 2129184 - DNA, 15 bp, Homo sapiens
atgtgcacaaactca

SEQ ID NO: 2129185 - DNA, 15 bp, Homo sapiens
tgtgcacaaactcaa

SEQ ID NO: 2129186 - DNA, 15 bp, Homo sapiens
gtgcacaaactcaat

SEQ ID NO: 2129187 - DNA, 15 bp, Homo sapiens
tgcacaaactcaatt

SEQ ID NO: 2129188 - DNA, 15 bp, Homo sapiens
gcacaaactcaattc

SEQ ID NO: 2129189 - DNA, 15 bp, Homo sapiens
cacaaactcaattct

SEQ ID NO: 2129190 - DNA, 15 bp, Homo sapiens
acaaactcaattctc

SEQ ID NO: 2129191 - DNA, 15 bp, Homo sapiens
caaactcaattctct

SEQ ID NO: 2129192 - DNA, 15 bp, Homo sapiens
aaactcaattctcta

SEQ ID NO: 2129193 - DNA, 15 bp, Homo sapiens
aactcaattctctaa

SEQ ID NO: 2129194 - DNA, 15 bp, Homo sapiens
actcaattctctaag

SEQ ID NO: 2129195 - DNA, 15 bp, Homo sapiens
ctcaattctctaagc

SEQ ID NO: 2129196 - DNA, 15 bp, Homo sapiens
tcaattctctaagca

SEQ ID NO: 2129197 - DNA, 15 bp, Homo sapiens
caattctctaagcat

SEQ ID NO: 2129198 - DNA, 15 bp, Homo sapiens
aattctctaagcatg

SEQ ID NO: 2129199 - DNA, 15 bp, Homo sapiens
attctctaagcatgt

SEQ ID NO: 2129200 - DNA, 15 bp, Homo sapiens
ttctctaagcatgtt

SEQ ID NO: 2129201 - DNA, 15 bp, Homo sapiens
tctctaagcatgttc

SEQ ID NO: 2129202 - DNA, 15 bp, Homo sapiens
ctctaagcatgttcc

SEQ ID NO: 2129203 - DNA, 15 bp, Homo sapiens
tctaagcatgttcct

SEQ ID NO: 2129204 - DNA, 15 bp, Homo sapiens
ctaagcatgttcctg

SEQ ID NO: 2129205 - DNA, 15 bp, Homo sapiens
taagcatgttcctgt

SEQ ID NO: 2129206 - DNA, 15 bp, Homo sapiens
aagcatgttcctgta

SEQ ID NO: 2129207 - DNA, 15 bp, Homo sapiens
agcatgttcctgtac

SEQ ID NO: 2129208 - DNA, 15 bp, Homo sapiens
gcatgttcctgtacc

SEQ ID NO: 2129209 - DNA, 15 bp, Homo sapiens
catgttcctgtacca

SEQ ID NO: 2129210 - DNA, 15 bp, Homo sapiens
atgttcctgtaccac

SEQ ID NO: 2129211 - DNA, 15 bp, Homo sapiens
tgttcctgtaccacc

SEQ ID NO: 2129212 - DNA, 15 bp, Homo sapiens
gttcctgtaccacct

SEQ ID NO: 2129213 - DNA, 15 bp, Homo sapiens
ttcctgtaccacctt

SEQ ID NO: 2129214 - DNA, 15 bp, Homo sapiens
tcctgtaccaccttt

SEQ ID NO: 2129215 - DNA, 15 bp, Homo sapiens
cctgtaccacctttg

SEQ ID NO: 2129216 - DNA, 15 bp, Homo sapiens
ctgtaccacctttgc

SEQ ID NO: 2129217 - DNA, 15 bp, Homo sapiens
tgtaccacctttgct

SEQ ID NO: 2129218 - DNA, 15 bp, Homo sapiens
gtaccacctttgctt

SEQ ID NO: 2129219 - DNA, 15 bp, Homo sapiens
taccacctttgcttt

SEQ ID NO: 2129220 - DNA, 15 bp, Homo sapiens
accacctttgcttta

SEQ ID NO: 2129221 - DNA, 15 bp, Homo sapiens
ccacctttgctttag

SEQ ID NO: 2129222 - DNA, 15 bp, Homo sapiens
cacctttgctttaga

SEQ ID NO: 2129223 - DNA, 15 bp, Homo sapiens
acctttgctttagag

SEQ ID NO: 2129224 - DNA, 15 bp, Homo sapiens
cctttgctttagagc

SEQ ID NO: 2129225 - DNA, 15 bp, Homo sapiens
ctttgctttagagca

SEQ ID NO: 2129226 - DNA, 15 bp, Homo sapiens
tttgctttagagcag

SEQ ID NO: 2129227 - DNA, 15 bp, Homo sapiens
ttgctttagagcagg

SEQ ID NO: 2129228 - DNA, 15 bp, Homo sapiens
tgctttagagcaggg

SEQ ID NO: 2129229 - DNA, 15 bp, Homo sapiens
gctttagagcagggg

SEQ ID NO: 2129230 - DNA, 15 bp, Homo sapiens
ctttagagcaggggg

SEQ ID NO: 2129231 - DNA, 15 bp, Homo sapiens
tttagagcaggggga

SEQ ID NO: 2129232 - DNA, 15 bp, Homo sapiens
ttagagcagggggat

SEQ ID NO: 2129233 - DNA, 15 bp, Homo sapiens
tagagcagggggatg

SEQ ID NO: 2129234 - DNA, 15 bp, Homo sapiens
agagcagggggatga

SEQ ID NO: 2129235 - DNA, 15 bp, Homo sapiens
gagcagggggatgat

SEQ ID NO: 2129236 - DNA, 15 bp, Homo sapiens
agcagggggatgata

SEQ ID NO: 2129237 - DNA, 15 bp, Homo sapiens
gcagggggatgatat

SEQ ID NO: 2129238 - DNA, 15 bp, Homo sapiens
cagggggatgatatt

SEQ ID NO: 2129239 - DNA, 15 bp, Homo sapiens
agggggatgatattc

SEQ ID NO: 2129240 - DNA, 15 bp, Homo sapiens
gggggatgatattca

SEQ ID NO: 2129241 - DNA, 15 bp, Homo sapiens
ggggatgatattcac

SEQ ID NO: 2129242 - DNA, 15 bp, Homo sapiens
gggatgatattcact

SEQ ID NO: 2129243 - DNA, 15 bp, Homo sapiens
ggatgatattcacta

SEQ ID NO: 2129244 - DNA, 15 bp, Homo sapiens
gatgatattcactaa

SEQ ID NO: 2129245 - DNA, 15 bp, Homo sapiens
atgatattcactaag

SEQ ID NO: 2129246 - DNA, 15 bp, Homo sapiens
tgatattcactaagt

SEQ ID NO: 2129247 - DNA, 15 bp, Homo sapiens
gatattcactaagtg

SEQ ID NO: 2129248 - DNA, 15 bp, Homo sapiens
atattcactaagtgc

SEQ ID NO: 2129249 - DNA, 15 bp, Homo sapiens
tattcactaagtgcc

SEQ ID NO: 2129250 - DNA, 15 bp, Homo sapiens
attcactaagtgccc

SEQ ID NO: 2129251 - DNA, 15 bp, Homo sapiens
ttcactaagtgcccc

SEQ ID NO: 2129252 - DNA, 15 bp, Homo sapiens
tcactaagtgcccct

SEQ ID NO: 2129253 - DNA, 15 bp, Homo sapiens
cactaagtgcccctt

SEQ ID NO: 2129254 - DNA, 15 bp, Homo sapiens
actaagtgccccttc

SEQ ID NO: 2129255 - DNA, 15 bp, Homo sapiens
ctaagtgccccttct

SEQ ID NO: 2129256 - DNA, 15 bp, Homo sapiens
taagtgccccttctt

SEQ ID NO: 2129257 - DNA, 15 bp, Homo sapiens
aagtgccccttcttt

SEQ ID NO: 2129258 - DNA, 15 bp, Homo sapiens
agtgccccttctttt

SEQ ID NO: 2129259 - DNA, 15 bp, Homo sapiens
gtgccccttcttttg

SEQ ID NO: 2129260 - DNA, 15 bp, Homo sapiens
tgccccttcttttgg

SEQ ID NO: 2129261 - DNA, 15 bp, Homo sapiens
gccccttcttttgga

SEQ ID NO: 2129262 - DNA, 15 bp, Homo sapiens
ccccttcttttggac

SEQ ID NO: 2129263 - DNA, 15 bp, Homo sapiens
cccttcttttggact

SEQ ID NO: 2129264 - DNA, 15 bp, Homo sapiens
ccttcttttggactt

SEQ ID NO: 2129265 - DNA, 15 bp, Homo sapiens
cttcttttggactta

SEQ ID NO: 2129266 - DNA, 15 bp, Homo sapiens
ttcttttggacttaa

SEQ ID NO: 2129267 - DNA, 15 bp, Homo sapiens
tcttttggacttaat

SEQ ID NO: 2129268 - DNA, 15 bp, Homo sapiens
cttttggacttaata

SEQ ID NO: 2129269 - DNA, 15 bp, Homo sapiens
ttttggacttaatat

SEQ ID NO: 2129270 - DNA, 15 bp, Homo sapiens
tttggacttaatatg

SEQ ID NO: 2129271 - DNA, 15 bp, Homo sapiens
ttggacttaatatgc

SEQ ID NO: 2129272 - DNA, 15 bp, Homo sapiens
tggacttaatatgca

SEQ ID NO: 2129273 - DNA, 15 bp, Homo sapiens
ggacttaatatgcat

SEQ ID NO: 2129274 - DNA, 15 bp, Homo sapiens
gacttaatatgcatt

SEQ ID NO: 2129275 - DNA, 15 bp, Homo sapiens
acttaatatgcatta

SEQ ID NO: 2129276 - DNA, 15 bp, Homo sapiens
cttaatatgcattaa

SEQ ID NO: 2129277 - DNA, 15 bp, Homo sapiens
ttaatatgcattaat

SEQ ID NO: 2129278 - DNA, 15 bp, Homo sapiens
taatatgcattaatg

SEQ ID NO: 2129279 - DNA, 15 bp, Homo sapiens
aatatgcattaatgc

SEQ ID NO: 2129280 - DNA, 15 bp, Homo sapiens
atatgcattaatgca

SEQ ID NO: 2129281 - DNA, 15 bp, Homo sapiens
tatgcattaatgcaa

SEQ ID NO: 2129282 - DNA, 15 bp, Homo sapiens
atgcattaatgcaat

SEQ ID NO: 2129283 - DNA, 15 bp, Homo sapiens
tgcattaatgcaatt

SEQ ID NO: 2129284 - DNA, 15 bp, Homo sapiens
gcattaatgcaattg

SEQ ID NO: 2129285 - DNA, 15 bp, Homo sapiens
cattaatgcaattgt

SEQ ID NO: 2129286 - DNA, 15 bp, Homo sapiens
attaatgcaattgtc

SEQ ID NO: 2129287 - DNA, 15 bp, Homo sapiens
ttaatgcaattgtcc

SEQ ID NO: 2129288 - DNA, 15 bp, Homo sapiens
taatgcaattgtcca

SEQ ID NO: 2129289 - DNA, 15 bp, Homo sapiens
aatgcaattgtccac

SEQ ID NO: 2129290 - DNA, 15 bp, Homo sapiens
atgcaattgtccacc

SEQ ID NO: 2129291 - DNA, 15 bp, Homo sapiens
tgcaattgtccacct

SEQ ID NO: 2129292 - DNA, 15 bp, Homo sapiens
gcaattgtccacctc

SEQ ID NO: 2129293 - DNA, 15 bp, Homo sapiens
caattgtccacctct

SEQ ID NO: 2129294 - DNA, 15 bp, Homo sapiens
aattgtccacctctt

SEQ ID NO: 2129295 - DNA, 15 bp, Homo sapiens
attgtccacctcttc

SEQ ID NO: 2129296 - DNA, 15 bp, Homo sapiens
ttgtccacctcttct

SEQ ID NO: 2129297 - DNA, 15 bp, Homo sapiens
tgtccacctcttctt

SEQ ID NO: 2129298 - DNA, 15 bp, Homo sapiens
gtccacctcttcttt

SEQ ID NO: 2129299 - DNA, 15 bp, Homo sapiens
tccacctcttctttt

SEQ ID NO: 2129300 - DNA, 15 bp, Homo sapiens
ccacctcttctttta

SEQ ID NO: 2129301 - DNA, 15 bp, Homo sapiens
cacctcttcttttag

SEQ ID NO: 2129302 - DNA, 15 bp, Homo sapiens
acctcttcttttaga

SEQ ID NO: 2129303 - DNA, 15 bp, Homo sapiens
cctcttcttttagac

SEQ ID NO: 2129304 - DNA, 15 bp, Homo sapiens
ctcttcttttagact

SEQ ID NO: 2129305 - DNA, 15 bp, Homo sapiens
tcttcttttagacta

SEQ ID NO: 2129306 - DNA, 15 bp, Homo sapiens
cttcttttagactaa

SEQ ID NO: 2129307 - DNA, 15 bp, Homo sapiens
ttcttttagactaag

SEQ ID NO: 2129308 - DNA, 15 bp, Homo sapiens
tcttttagactaaga

SEQ ID NO: 2129309 - DNA, 15 bp, Homo sapiens
cttttagactaagag

SEQ ID NO: 2129310 - DNA, 15 bp, Homo sapiens
ttttagactaagagt

SEQ ID NO: 2129311 - DNA, 15 bp, Homo sapiens
tttagactaagagtt

SEQ ID NO: 2129312 - DNA, 15 bp, Homo sapiens
ttagactaagagttg

SEQ ID NO: 2129313 - DNA, 15 bp, Homo sapiens
tagactaagagttga

SEQ ID NO: 2129314 - DNA, 15 bp, Homo sapiens
agactaagagttgat

SEQ ID NO: 2129315 - DNA, 15 bp, Homo sapiens
gactaagagttgatc

SEQ ID NO: 2129316 - DNA, 15 bp, Homo sapiens
actaagagttgatct

SEQ ID NO: 2129317 - DNA, 15 bp, Homo sapiens
ctaagagttgatctc

SEQ ID NO: 2129318 - DNA, 15 bp, Homo sapiens
taagagttgatctcc

SEQ ID NO: 2129319 - DNA, 15 bp, Homo sapiens
aagagttgatctcca

SEQ ID NO: 2129320 - DNA, 15 bp, Homo sapiens
agagttgatctccac

SEQ ID NO: 2129321 - DNA, 15 bp, Homo sapiens
gagttgatctccaca

SEQ ID NO: 2129322 - DNA, 15 bp, Homo sapiens
agttgatctccacat

SEQ ID NO: 2129323 - DNA, 15 bp, Homo sapiens
gttgatctccacata

SEQ ID NO: 2129324 - DNA, 15 bp, Homo sapiens
ttgatctccacatat

SEQ ID NO: 2129325 - DNA, 15 bp, Homo sapiens
tgatctccacatatt

SEQ ID NO: 2129326 - DNA, 15 bp, Homo sapiens
gatctccacatattc

SEQ ID NO: 2129327 - DNA, 15 bp, Homo sapiens
atctccacatattcc

SEQ ID NO: 2129328 - DNA, 15 bp, Homo sapiens
tctccacatattccc

SEQ ID NO: 2129329 - DNA, 15 bp, Homo sapiens
ctccacatattcccc

SEQ ID NO: 2129330 - DNA, 15 bp, Homo sapiens
tccacatattcccct

SEQ ID NO: 2129331 - DNA, 15 bp, Homo sapiens
ccacatattcccctt

SEQ ID NO: 2129332 - DNA, 15 bp, Homo sapiens
cacatattccccttg

SEQ ID NO: 2129333 - DNA, 15 bp, Homo sapiens
acatattccccttgc

SEQ ID NO: 2129334 - DNA, 15 bp, Homo sapiens
catattccccttgca

SEQ ID NO: 2129335 - DNA, 15 bp, Homo sapiens
atattccccttgcat

SEQ ID NO: 2129336 - DNA, 15 bp, Homo sapiens
tattccccttgcatc

SEQ ID NO: 2129337 - DNA, 15 bp, Homo sapiens
attccccttgcatca

SEQ ID NO: 2129338 - DNA, 15 bp, Homo sapiens
ttccccttgcatcag

SEQ ID NO: 2129339 - DNA, 15 bp, Homo sapiens
tccccttgcatcagg

SEQ ID NO: 2129340 - DNA, 15 bp, Homo sapiens
ccccttgcatcaggg

SEQ ID NO: 2129341 - DNA, 15 bp, Homo sapiens
cccttgcatcagggg

SEQ ID NO: 2129342 - DNA, 15 bp, Homo sapiens
ccttgcatcaggggc

SEQ ID NO: 2129343 - DNA, 15 bp, Homo sapiens
cttgcatcaggggca

SEQ ID NO: 2129344 - DNA, 15 bp, Homo sapiens
ttgcatcaggggcat

SEQ ID NO: 2129345 - DNA, 15 bp, Homo sapiens
tgcatcaggggcatg

SEQ ID NO: 2129346 - DNA, 15 bp, Homo sapiens
gcatcaggggcatgt

SEQ ID NO: 2129347 - DNA, 15 bp, Homo sapiens
catcaggggcatgtt

SEQ ID NO: 2129348 - DNA, 15 bp, Homo sapiens
atcaggggcatgtta

SEQ ID NO: 2129349 - DNA, 15 bp, Homo sapiens
tcaggggcatgttaa

SEQ ID NO: 2129350 - DNA, 15 bp, Homo sapiens
caggggcatgttaat

SEQ ID NO: 2129351 - DNA, 15 bp, Homo sapiens
aggggcatgttaatt

SEQ ID NO: 2129352 - DNA, 15 bp, Homo sapiens
ggggcatgttaatta

SEQ ID NO: 2129353 - DNA, 15 bp, Homo sapiens
gggcatgttaattat

SEQ ID NO: 2129354 - DNA, 15 bp, Homo sapiens
ggcatgttaattatg

SEQ ID NO: 2129355 - DNA, 15 bp, Homo sapiens
gcatgttaattatga

SEQ ID NO: 2129356 - DNA, 15 bp, Homo sapiens
catgttaattatgaa

SEQ ID NO: 2129357 - DNA, 15 bp, Homo sapiens
atgttaattatgaat

SEQ ID NO: 2129358 - DNA, 15 bp, Homo sapiens
tgttaattatgaatg

SEQ ID NO: 2129359 - DNA, 15 bp, Homo sapiens
gttaattatgaatga

SEQ ID NO: 2129360 - DNA, 15 bp, Homo sapiens
ttaattatgaatgaa

SEQ ID NO: 2129361 - DNA, 15 bp, Homo sapiens
taattatgaatgaac

SEQ ID NO: 2129362 - DNA, 15 bp, Homo sapiens
aattatgaatgaacc

SEQ ID NO: 2129363 - DNA, 15 bp, Homo sapiens
attatgaatgaaccc

SEQ ID NO: 2129364 - DNA, 15 bp, Homo sapiens
ttatgaatgaaccct

SEQ ID NO: 2129365 - DNA, 15 bp, Homo sapiens
tatgaatgaaccctt

SEQ ID NO: 2129366 - DNA, 15 bp, Homo sapiens
atgaatgaacccttt

SEQ ID NO: 2129367 - DNA, 15 bp, Homo sapiens
tgaatgaaccctttt

SEQ ID NO: 2129368 - DNA, 15 bp, Homo sapiens
gaatgaacccttttc

SEQ ID NO: 2129369 - DNA, 15 bp, Homo sapiens
aatgaacccttttct

SEQ ID NO: 2129370 - DNA, 15 bp, Homo sapiens
atgaacccttttctt

SEQ ID NO: 2129371 - DNA, 15 bp, Homo sapiens
tgaacccttttcttt

SEQ ID NO: 2129372 - DNA, 15 bp, Homo sapiens
gaacccttttctttt

SEQ ID NO: 2129373 - DNA, 15 bp, Homo sapiens
aacccttttctttta

SEQ ID NO: 2129374 - DNA, 15 bp, Homo sapiens
acccttttcttttaa

SEQ ID NO: 2129375 - DNA, 15 bp, Homo sapiens
cccttttcttttaat

SEQ ID NO: 2129376 - DNA, 15 bp, Homo sapiens
ccttttcttttaata

SEQ ID NO: 2129377 - DNA, 15 bp, Homo sapiens
cttttcttttaatat

SEQ ID NO: 2129378 - DNA, 15 bp, Homo sapiens
ttttcttttaatatt

SEQ ID NO: 2129379 - DNA, 15 bp, Homo sapiens
tttcttttaatatta

SEQ ID NO: 2129380 - DNA, 15 bp, Homo sapiens
ttcttttaatattaa

SEQ ID NO: 2129381 - DNA, 15 bp, Homo sapiens
tcttttaatattaat

SEQ ID NO: 2129382 - DNA, 15 bp, Homo sapiens
cttttaatattaatg

SEQ ID NO: 2129383 - DNA, 15 bp, Homo sapiens
ttttaatattaatgt

SEQ ID NO: 2129384 - DNA, 15 bp, Homo sapiens
tttaatattaatgtc

SEQ ID NO: 2129385 - DNA, 15 bp, Homo sapiens
ttaatattaatgtca

SEQ ID NO: 2129386 - DNA, 15 bp, Homo sapiens
taatattaatgtcat

SEQ ID NO: 2129387 - DNA, 15 bp, Homo sapiens
aatattaatgtcata

SEQ ID NO: 2129388 - DNA, 15 bp, Homo sapiens
atattaatgtcataa

SEQ ID NO: 2129389 - DNA, 15 bp, Homo sapiens
tattaatgtcataat

SEQ ID NO: 2129390 - DNA, 15 bp, Homo sapiens
attaatgtcataatt

SEQ ID NO: 2129391 - DNA, 15 bp, Homo sapiens
ttaatgtcataattg

SEQ ID NO: 2129392 - DNA, 15 bp, Homo sapiens
taatgtcataattgt

SEQ ID NO: 2129393 - DNA, 15 bp, Homo sapiens
aatgtcataattgta

SEQ ID NO: 2129394 - DNA, 15 bp, Homo sapiens
atgtcataattgtat

SEQ ID NO: 2129395 - DNA, 15 bp, Homo sapiens
tgtcataattgtatt

SEQ ID NO: 2129396 - DNA, 15 bp, Homo sapiens
gtcataattgtattt

SEQ ID NO: 2129397 - DNA, 15 bp, Homo sapiens
ataattgtatttgtg

SEQ ID NO: 2129398 - DNA, 15 bp, Homo sapiens
taattgtatttgtgg

SEQ ID NO: 2129399 - DNA, 15 bp, Homo sapiens
aattgtatttgtgga

SEQ ID NO: 2129400 - DNA, 15 bp, Homo sapiens
attgtatttgtggac

SEQ ID NO: 2129401 - DNA, 15 bp, Homo sapiens
ttgtatttgtggacc

SEQ ID NO: 2129402 - DNA, 15 bp, Homo sapiens
tgtatttgtggacct

SEQ ID NO: 2129403 - DNA, 15 bp, Homo sapiens
gtatttgtggacctg

SEQ ID NO: 2129404 - DNA, 15 bp, Homo sapiens
tatttgtggacctgt

SEQ ID NO: 2129405 - DNA, 15 bp, Homo sapiens
atttgtggacctgtg

SEQ ID NO: 2129406 - DNA, 15 bp, Homo sapiens
tttgtggacctgtgt

SEQ ID NO: 2129407 - DNA, 15 bp, Homo sapiens
ttgtggacctgtgta

SEQ ID NO: 2129408 - DNA, 15 bp, Homo sapiens
tgtggacctgtgtag

SEQ ID NO: 2129409 - DNA, 15 bp, Homo sapiens
gtggacctgtgtagg

SEQ ID NO: 2129410 - DNA, 15 bp, Homo sapiens
tggacctgtgtagga

SEQ ID NO: 2129411 - DNA, 15 bp, Homo sapiens
ggacctgtgtaggag

SEQ ID NO: 2129412 - DNA, 15 bp, Homo sapiens
gacctgtgtaggaga

SEQ ID NO: 2129413 - DNA, 15 bp, Homo sapiens
acctgtgtaggagaa

SEQ ID NO: 2129414 - DNA, 15 bp, Homo sapiens
tgtgtaggagaaaaa

SEQ ID NO: 2129415 - DNA, 15 bp, Homo sapiens
gtgtaggagaaaaag

SEQ ID NO: 2129416 - DNA, 15 bp, Homo sapiens
tgtaggagaaaaaga

SEQ ID NO: 2129417 - DNA, 15 bp, Homo sapiens
gtaggagaaaaagac

SEQ ID NO: 2129418 - DNA, 15 bp, Homo sapiens
taggagaaaaagacc

SEQ ID NO: 2129419 - DNA, 15 bp, Homo sapiens
aggagaaaaagaccc

SEQ ID NO: 2129420 - DNA, 15 bp, Homo sapiens
ggagaaaaagaccct

SEQ ID NO: 2129421 - DNA, 15 bp, Homo sapiens
gagaaaaagacccta

SEQ ID NO: 2129422 - DNA, 15 bp, Homo sapiens
agaaaaagaccctat

SEQ ID NO: 2129423 - DNA, 15 bp, Homo sapiens
gaaaaagaccctatg

SEQ ID NO: 2129424 - DNA, 15 bp, Homo sapiens
aaaaagaccctatgt

SEQ ID NO: 2129425 - DNA, 15 bp, Homo sapiens
aaaagaccctatgtt

SEQ ID NO: 2129426 - DNA, 15 bp, Homo sapiens
aaagaccctatgttc

SEQ ID NO: 2129427 - DNA, 15 bp, Homo sapiens
aagaccctatgttcc

SEQ ID NO: 2129428 - DNA, 15 bp, Homo sapiens
agaccctatgttcct

SEQ ID NO: 2129429 - DNA, 15 bp, Homo sapiens
gaccctatgttcctc

SEQ ID NO: 2129430 - DNA, 15 bp, Homo sapiens
accctatgttcctcc

SEQ ID NO: 2129431 - DNA, 15 bp, Homo sapiens
ccctatgttcctccc

SEQ ID NO: 2129432 - DNA, 15 bp, Homo sapiens
cctatgttcctccca

SEQ ID NO: 2129433 - DNA, 15 bp, Homo sapiens
ctatgttcctcccat

SEQ ID NO: 2129434 - DNA, 15 bp, Homo sapiens
tatgttcctcccatt

SEQ ID NO: 2129435 - DNA, 15 bp, Homo sapiens
atgttcctcccatta

SEQ ID NO: 2129436 - DNA, 15 bp, Homo sapiens
tgttcctcccattac

SEQ ID NO: 2129437 - DNA, 15 bp, Homo sapiens
gttcctcccattacc

SEQ ID NO: 2129438 - DNA, 15 bp, Homo sapiens
ttcctcccattaccc

SEQ ID NO: 2129439 - DNA, 15 bp, Homo sapiens
tcctcccattaccct

SEQ ID NO: 2129440 - DNA, 15 bp, Homo sapiens
cctcccattaccctt

SEQ ID NO: 2129441 - DNA, 15 bp, Homo sapiens
ctcccattacccttt

SEQ ID NO: 2129442 - DNA, 15 bp, Homo sapiens
tcccattaccctttg

SEQ ID NO: 2129443 - DNA, 15 bp, Homo sapiens
cccattaccctttgg

SEQ ID NO: 2129444 - DNA, 15 bp, Homo sapiens
ccattaccctttgga

SEQ ID NO: 2129445 - DNA, 15 bp, Homo sapiens
cattaccctttggat

SEQ ID NO: 2129446 - DNA, 15 bp, Homo sapiens
attaccctttggatt

SEQ ID NO: 2129447 - DNA, 15 bp, Homo sapiens
ttaccctttggattg

SEQ ID NO: 2129448 - DNA, 15 bp, Homo sapiens
taccctttggattgc

SEQ ID NO: 2129449 - DNA, 15 bp, Homo sapiens
accctttggattgct

SEQ ID NO: 2129450 - DNA, 15 bp, Homo sapiens
ccctttggattgctg

SEQ ID NO: 2129451 - DNA, 15 bp, Homo sapiens
cctttggattgctgc

SEQ ID NO: 2129452 - DNA, 15 bp, Homo sapiens
tggcccctttttaca

SEQ ID NO: 2129453 - DNA, 15 bp, Homo sapiens
ggcccctttttacag

SEQ ID NO: 2129454 - DNA, 15 bp, Homo sapiens
gcccctttttacaga

SEQ ID NO: 2129455 - DNA, 15 bp, Homo sapiens
cccctttttacagac

SEQ ID NO: 2129456 - DNA, 15 bp, Homo sapiens
ccctttttacagact

SEQ ID NO: 2129457 - DNA, 15 bp, Homo sapiens
cctttttacagacta

SEQ ID NO: 2129458 - DNA, 15 bp, Homo sapiens
ctttttacagactat

SEQ ID NO: 2129459 - DNA, 15 bp, Homo sapiens
tttttacagactatt

SEQ ID NO: 2129460 - DNA, 15 bp, Homo sapiens
ttttacagactattg

SEQ ID NO: 2129461 - DNA, 15 bp, Homo sapiens
tttacagactattgc

SEQ ID NO: 2129462 - DNA, 15 bp, Homo sapiens
ttacagactattgct

SEQ ID NO: 2129463 - DNA, 15 bp, Homo sapiens
tacagactattgctc

SEQ ID NO: 2129464 - DNA, 15 bp, Homo sapiens
acagactattgctca

SEQ ID NO: 2129465 - DNA, 15 bp, Homo sapiens
cagactattgctcac

SEQ ID NO: 2129466 - DNA, 15 bp, Homo sapiens
agactattgctcaca

SEQ ID NO: 2129467 - DNA, 15 bp, Homo sapiens
gactattgctcacaa

SEQ ID NO: 2129468 - DNA, 15 bp, Homo sapiens
actattgctcacaat

SEQ ID NO: 2129469 - DNA, 15 bp, Homo sapiens
ctattgctcacaatc

SEQ ID NO: 2129470 - DNA, 15 bp, Homo sapiens
tattgctcacaatct

SEQ ID NO: 2129471 - DNA, 15 bp, Homo sapiens
attgctcacaatctc

SEQ ID NO: 2129472 - DNA, 15 bp, Homo sapiens
ttgctcacaatctca

SEQ ID NO: 2129473 - DNA, 15 bp, Homo sapiens
tgctcacaatctcag

SEQ ID NO: 2129474 - DNA, 15 bp, Homo sapiens
gctcacaatctcagg

SEQ ID NO: 2129475 - DNA, 15 bp, Homo sapiens
ctcacaatctcaggt

SEQ ID NO: 2129476 - DNA, 15 bp, Homo sapiens
tcacaatctcaggtg

SEQ ID NO: 2129477 - DNA, 15 bp, Homo sapiens
cacaatctcaggtgt

SEQ ID NO: 2129478 - DNA, 15 bp, Homo sapiens
acaatctcaggtgtc

SEQ ID NO: 2129479 - DNA, 15 bp, Homo sapiens
caatctcaggtgtcc

SEQ ID NO: 2129480 - DNA, 15 bp, Homo sapiens
aatctcaggtgtcca

SEQ ID NO: 2129481 - DNA, 15 bp, Homo sapiens
atctcaggtgtccat

SEQ ID NO: 2129482 - DNA, 15 bp, Homo sapiens
tctcaggtgtccata

SEQ ID NO: 2129483 - DNA, 15 bp, Homo sapiens
ctcaggtgtccatat

SEQ ID NO: 2129484 - DNA, 15 bp, Homo sapiens
tcaggtgtccatatt

SEQ ID NO: 2129485 - DNA, 15 bp, Homo sapiens
caggtgtccatattt

SEQ ID NO: 2129486 - DNA, 15 bp, Homo sapiens
aggtgtccatatttg

SEQ ID NO: 2129487 - DNA, 15 bp, Homo sapiens
ggtgtccatatttgc

SEQ ID NO: 2129488 - DNA, 15 bp, Homo sapiens
gtgtccatatttgca

SEQ ID NO: 2129489 - DNA, 15 bp, Homo sapiens
tgtccatatttgcag

SEQ ID NO: 2129490 - DNA, 15 bp, Homo sapiens
gtccatatttgcagc

SEQ ID NO: 2129491 - DNA, 15 bp, Homo sapiens
tccatatttgcagct

SEQ ID NO: 2129492 - DNA, 15 bp, Homo sapiens
ccatatttgcagcta

SEQ ID NO: 2129493 - DNA, 15 bp, Homo sapiens
catatttgcagctat

SEQ ID NO: 2129494 - DNA, 15 bp, Homo sapiens
atatttgcagctatt

SEQ ID NO: 2129495 - DNA, 15 bp, Homo sapiens
tatttgcagctatta

SEQ ID NO: 2129496 - DNA, 15 bp, Homo sapiens
atttgcagctattag

SEQ ID NO: 2129497 - DNA, 15 bp, Homo sapiens
tttgcagctattagg

SEQ ID NO: 2129498 - DNA, 15 bp, Homo sapiens
ttgcagctattaggt

SEQ ID NO: 2129499 - DNA, 15 bp, Homo sapiens
tgcagctattaggta

SEQ ID NO: 2129500 - DNA, 15 bp, Homo sapiens
gcagctattaggtaa

SEQ ID NO: 2129501 - DNA, 15 bp, Homo sapiens
cagctattaggtaag

SEQ ID NO: 2129502 - DNA, 15 bp, Homo sapiens
agctattaggtaaga

SEQ ID NO: 2129503 - DNA, 15 bp, Homo sapiens
gctattaggtaagat

SEQ ID NO: 2129504 - DNA, 15 bp, Homo sapiens
ctattaggtaagatt

SEQ ID NO: 2129505 - DNA, 15 bp, Homo sapiens
tattaggtaagattg

SEQ ID NO: 2129506 - DNA, 15 bp, Homo sapiens
attaggtaagattgt

SEQ ID NO: 2129507 - DNA, 15 bp, Homo sapiens
ttaggtaagattgtg

SEQ ID NO: 2129508 - DNA, 15 bp, Homo sapiens
taggtaagattgtgc

SEQ ID NO: 2129509 - DNA, 15 bp, Homo sapiens
aggtaagattgtgct

SEQ ID NO: 2129510 - DNA, 15 bp, Homo sapiens
ggtaagattgtgctg

SEQ ID NO: 2129511 - DNA, 15 bp, Homo sapiens
gtaagattgtgctgt

SEQ ID NO: 2129512 - DNA, 15 bp, Homo sapiens
taagattgtgctgtc

SEQ ID NO: 2129513 - DNA, 15 bp, Homo sapiens
aagattgtgctgtct

SEQ ID NO: 2129514 - DNA, 15 bp, Homo sapiens
agattgtgctgtctc

SEQ ID NO: 2129515 - DNA, 15 bp, Homo sapiens
gattgtgctgtctcc

SEQ ID NO: 2129516 - DNA, 15 bp, Homo sapiens
attgtgctgtctccc

SEQ ID NO: 2129517 - DNA, 15 bp, Homo sapiens
ttgtgctgtctccct

SEQ ID NO: 2129518 - DNA, 15 bp, Homo sapiens
tgtgctgtctccctc

SEQ ID NO: 2129519 - DNA, 15 bp, Homo sapiens
gtgctgtctccctct

SEQ ID NO: 2129520 - DNA, 15 bp, Homo sapiens
tgctgtctccctctt

SEQ ID NO: 2129521 - DNA, 15 bp, Homo sapiens
gctgtctccctcttc

SEQ ID NO: 2129522 - DNA, 15 bp, Homo sapiens
gccccttctgtgtta

SEQ ID NO: 2129523 - DNA, 15 bp, Homo sapiens
ccccttctgtgttat

SEQ ID NO: 2129524 - DNA, 15 bp, Homo sapiens
cccttctgtgttatt

SEQ ID NO: 2129525 - DNA, 15 bp, Homo sapiens
ccttctgtgttatta

SEQ ID NO: 2129526 - DNA, 15 bp, Homo sapiens
cttctgtgttattaa

SEQ ID NO: 2129527 - DNA, 15 bp, Homo sapiens
ttctgtgttattaat

SEQ ID NO: 2129528 - DNA, 15 bp, Homo sapiens
tctgtgttattaata

SEQ ID NO: 2129529 - DNA, 15 bp, Homo sapiens
ctgtgttattaataa

SEQ ID NO: 2129530 - DNA, 15 bp, Homo sapiens
tgtgttattaataaa

SEQ ID NO: 2129531 - DNA, 15 bp, Homo sapiens
gtgttattaataaac

SEQ ID NO: 2129532 - DNA, 15 bp, Homo sapiens
tgttattaataaaca

SEQ ID NO: 2129533 - DNA, 15 bp, Homo sapiens
gttattaataaacac

SEQ ID NO: 2129534 - DNA, 15 bp, Homo sapiens
ttattaataaacaca

SEQ ID NO: 2129535 - DNA, 15 bp, Homo sapiens
tattaataaacacag

SEQ ID NO: 2129536 - DNA, 15 bp, Homo sapiens
attaataaacacagt

SEQ ID NO: 2129537 - DNA, 15 bp, Homo sapiens
ttaataaacacagta

SEQ ID NO: 2129538 - DNA, 15 bp, Homo sapiens
taataaacacagtac

SEQ ID NO: 2129539 - DNA, 15 bp, Homo sapiens
aataaacacagtact

SEQ ID NO: 2129540 - DNA, 15 bp, Homo sapiens
ataaacacagtactg

SEQ ID NO: 2129541 - DNA, 15 bp, Homo sapiens
taaacacagtactga

SEQ ID NO: 2129542 - DNA, 15 bp, Homo sapiens
aaacacagtactgat

SEQ ID NO: 2129543 - DNA, 15 bp, Homo sapiens
aacacagtactgatt

SEQ ID NO: 2129544 - DNA, 15 bp, Homo sapiens
acacagtactgattg

SEQ ID NO: 2129545 - DNA, 15 bp, Homo sapiens
cacagtactgattgt

SEQ ID NO: 2129546 - DNA, 15 bp, Homo sapiens
acagtactgattgtc

SEQ ID NO: 2129547 - DNA, 15 bp, Homo sapiens
cagtactgattgtcc

SEQ ID NO: 2129548 - DNA, 15 bp, Homo sapiens
agtactgattgtccc

SEQ ID NO: 2129549 - DNA, 15 bp, Homo sapiens
gtactgattgtccca

SEQ ID NO: 2129550 - DNA, 15 bp, Homo sapiens
tactgattgtcccat

SEQ ID NO: 2129551 - DNA, 15 bp, Homo sapiens
actgattgtcccatt

SEQ ID NO: 2129552 - DNA, 15 bp, Homo sapiens
ctgattgtcccattt

SEQ ID NO: 2129553 - DNA, 15 bp, Homo sapiens
tgattgtcccatttt

SEQ ID NO: 2129554 - DNA, 15 bp, Homo sapiens
gattgtcccattttt

SEQ ID NO: 2129555 - DNA, 15 bp, Homo sapiens
attgtcccatttttc

SEQ ID NO: 2129556 - DNA, 15 bp, Homo sapiens
ttgtcccatttttca

SEQ ID NO: 2129557 - DNA, 15 bp, Homo sapiens
tgtcccatttttcag

SEQ ID NO: 2129558 - DNA, 15 bp, Homo sapiens
gtcccatttttcagc

SEQ ID NO: 2129559 - DNA, 15 bp, Homo sapiens
tcccatttttcagcc

SEQ ID NO: 2129560 - DNA, 15 bp, Homo sapiens
cccatttttcagccc

SEQ ID NO: 2129561 - DNA, 15 bp, Homo sapiens
ccatttttcagccca

SEQ ID NO: 2129562 - DNA, 15 bp, Homo sapiens
catttttcagcccat

SEQ ID NO: 2129563 - DNA, 15 bp, Homo sapiens
atttttcagcccatc

SEQ ID NO: 2129564 - DNA, 15 bp, Homo sapiens
tttttcagcccatca

SEQ ID NO: 2129565 - DNA, 15 bp, Homo sapiens
ttttcagcccatcag

SEQ ID NO: 2129566 - DNA, 15 bp, Homo sapiens
tttcagcccatcagt

SEQ ID NO: 2129567 - DNA, 15 bp, Homo sapiens
ttcagcccatcagtc

SEQ ID NO: 2129568 - DNA, 15 bp, Homo sapiens
tcagcccatcagtcc

SEQ ID NO: 2129569 - DNA, 15 bp, Homo sapiens
cagcccatcagtcca

SEQ ID NO: 2129570 - DNA, 15 bp, Homo sapiens
agcccatcagtccaa

SEQ ID NO: 2129571 - DNA, 15 bp, Homo sapiens
gcccatcagtccaag

SEQ ID NO: 2129572 - DNA, 15 bp, Homo sapiens
cccatcagtccaaga

SEQ ID NO: 2129573 - DNA, 15 bp, Homo sapiens
ccatcagtccaagat

SEQ ID NO: 2129574 - DNA, 15 bp, Homo sapiens
catcagtccaagatc

SEQ ID NO: 2129575 - DNA, 15 bp, Homo sapiens
atcagtccaagatct

SEQ ID NO: 2129576 - DNA, 15 bp, Homo sapiens
tcagtccaagatctc

SEQ ID NO: 2129577 - DNA, 15 bp, Homo sapiens
cagtccaagatctcc

SEQ ID NO: 2129578 - DNA, 15 bp, Homo sapiens
agtccaagatctccc

SEQ ID NO: 2129579 - DNA, 15 bp, Homo sapiens
gtccaagatctccct

SEQ ID NO: 2129580 - DNA, 15 bp, Homo sapiens
tccaagatctcccta

SEQ ID NO: 2129581 - DNA, 15 bp, Homo sapiens
ccaagatctccctac

SEQ ID NO: 2129582 - DNA, 15 bp, Homo sapiens
caagatctccctacc

SEQ ID NO: 2129583 - DNA, 15 bp, Homo sapiens
aagatctccctacca

SEQ ID NO: 2129584 - DNA, 15 bp, Homo sapiens
agatctccctaccac

SEQ ID NO: 2129585 - DNA, 15 bp, Homo sapiens
gatctccctaccact

SEQ ID NO: 2129586 - DNA, 15 bp, Homo sapiens
atctccctaccactt

SEQ ID NO: 2129587 - DNA, 15 bp, Homo sapiens
tctccctaccacttt

SEQ ID NO: 2129588 - DNA, 15 bp, Homo sapiens
ctccctaccactttg

SEQ ID NO: 2129589 - DNA, 15 bp, Homo sapiens
tccctaccactttgg

SEQ ID NO: 2129590 - DNA, 15 bp, Homo sapiens
ccctaccactttggt

SEQ ID NO: 2129591 - DNA, 15 bp, Homo sapiens
cctaccactttggtg

SEQ ID NO: 2129592 - DNA, 15 bp, Homo sapiens
ctaccactttggtgt

SEQ ID NO: 2129593 - DNA, 15 bp, Homo sapiens
taccactttggtgtg

SEQ ID NO: 2129594 - DNA, 15 bp, Homo sapiens
accactttggtgtgt

SEQ ID NO: 2129595 - DNA, 15 bp, Homo sapiens
ccactttggtgtgtt

SEQ ID NO: 2129596 - DNA, 15 bp, Homo sapiens
cactttggtgtgttg

SEQ ID NO: 2129597 - DNA, 15 bp, Homo sapiens
actttggtgtgttgg

SEQ ID NO: 2129598 - DNA, 15 bp, Homo sapiens
ctttggtgtgttggt

SEQ ID NO: 2129599 - DNA, 15 bp, Homo sapiens
tttggtgtgttggtg

SEQ ID NO: 2129600 - DNA, 15 bp, Homo sapiens
ttggtgtgttggtgc

SEQ ID NO: 2129601 - DNA, 15 bp, Homo sapiens
tggtgtgttggtgca

SEQ ID NO: 2129602 - DNA, 15 bp, Homo sapiens
ggtgtgttggtgcag

SEQ ID NO: 2129603 - DNA, 15 bp, Homo sapiens
gtgtgttggtgcagt

SEQ ID NO: 2129604 - DNA, 15 bp, Homo sapiens
tgtgttggtgcagtg

SEQ ID NO: 2129605 - DNA, 15 bp, Homo sapiens
gtgttggtgcagtgt

SEQ ID NO: 2129606 - DNA, 15 bp, Homo sapiens
tgttggtgcagtgtt

SEQ ID NO: 2129607 - DNA, 15 bp, Homo sapiens
gttggtgcagtgttg

SEQ ID NO: 2129608 - DNA, 15 bp, Homo sapiens
ttggtgcagtgttga

SEQ ID NO: 2129609 - DNA, 15 bp, Homo sapiens
tggtgcagtgttgac

SEQ ID NO: 2129610 - DNA, 15 bp, Homo sapiens
ggtgcagtgttgact

SEQ ID NO: 2129611 - DNA, 15 bp, Homo sapiens
gtgcagtgttgacta

SEQ ID NO: 2129612 - DNA, 15 bp, Homo sapiens
tgcagtgttgactat

SEQ ID NO: 2129613 - DNA, 15 bp, Homo sapiens
gcagtgttgactatg

SEQ ID NO: 2129614 - DNA, 15 bp, Homo sapiens
cagtgttgactatga

SEQ ID NO: 2129615 - DNA, 15 bp, Homo sapiens
agtgttgactatgaa

SEQ ID NO: 2129616 - DNA, 15 bp, Homo sapiens
gtgttgactatgaaa

SEQ ID NO: 2129617 - DNA, 15 bp, Homo sapiens
tgttgactatgaaaa

SEQ ID NO: 2129618 - DNA, 15 bp, Homo sapiens
gttgactatgaaaag

SEQ ID NO: 2129619 - DNA, 15 bp, Homo sapiens
ttgactatgaaaagc

SEQ ID NO: 2129620 - DNA, 15 bp, Homo sapiens
tgactatgaaaagca

SEQ ID NO: 2129621 - DNA, 15 bp, Homo sapiens
gactatgaaaagcag

SEQ ID NO: 2129622 - DNA, 15 bp, Homo sapiens
actatgaaaagcagg

SEQ ID NO: 2129623 - DNA, 15 bp, Homo sapiens
ctatgaaaagcaggc

SEQ ID NO: 2129624 - DNA, 15 bp, Homo sapiens
tatgaaaagcaggcc

SEQ ID NO: 2129625 - DNA, 15 bp, Homo sapiens
atgaaaagcaggcct

SEQ ID NO: 2129626 - DNA, 15 bp, Homo sapiens
tgaaaagcaggcctg

SEQ ID NO: 2129627 - DNA, 15 bp, Homo sapiens
gaaaagcaggcctga

SEQ ID NO: 2129628 - DNA, 15 bp, Homo sapiens
aaaagcaggcctgaa

SEQ ID NO: 2129629 - DNA, 15 bp, Homo sapiens
aaagcaggcctgaac

SEQ ID NO: 2129630 - DNA, 15 bp, Homo sapiens
aagcaggcctgaact

SEQ ID NO: 2129631 - DNA, 15 bp, Homo sapiens
agcaggcctgaacta

SEQ ID NO: 2129632 - DNA, 15 bp, Homo sapiens
gcaggcctgaactag

SEQ ID NO: 2129633 - DNA, 15 bp, Homo sapiens
caggcctgaactagg

SEQ ID NO: 2129634 - DNA, 15 bp, Homo sapiens
aggcctgaactaggt

SEQ ID NO: 2129635 - DNA, 15 bp, Homo sapiens
ggcctgaactaggtg

SEQ ID NO: 2129636 - DNA, 15 bp, Homo sapiens
gcctgaactaggtgg

SEQ ID NO: 2129637 - DNA, 15 bp, Homo sapiens
cctgaactaggtgga

SEQ ID NO: 2129638 - DNA, 15 bp, Homo sapiens
ctgaactaggtggat

SEQ ID NO: 2129639 - DNA, 15 bp, Homo sapiens
tgaactaggtggata

SEQ ID NO: 2129640 - DNA, 15 bp, Homo sapiens
gaactaggtggataa

SEQ ID NO: 2129641 - DNA, 15 bp, Homo sapiens
aactaggtggataag

SEQ ID NO: 2129642 - DNA, 15 bp, Homo sapiens
actaggtggataagc

SEQ ID NO: 2129643 - DNA, 15 bp, Homo sapiens
ctaggtggataagcc

SEQ ID NO: 2129644 - DNA, 15 bp, Homo sapiens
taggtggataagcct

SEQ ID NO: 2129645 - DNA, 15 bp, Homo sapiens
aggtggataagcctt

SEQ ID NO: 2129646 - DNA, 15 bp, Homo sapiens
ggtggataagccttc

SEQ ID NO: 2129647 - DNA, 15 bp, Homo sapiens
gtggataagccttca

SEQ ID NO: 2129648 - DNA, 15 bp, Homo sapiens
tggataagccttcac

SEQ ID NO: 2129649 - DNA, 15 bp, Homo sapiens
ggataagccttcact

SEQ ID NO: 2129650 - DNA, 15 bp, Homo sapiens
gataagccttcactc

SEQ ID NO: 2129651 - DNA, 15 bp, Homo sapiens
ataagccttcactca

SEQ ID NO: 2129652 - DNA, 15 bp, Homo sapiens
taagccttcactcat

SEQ ID NO: 2129653 - DNA, 15 bp, Homo sapiens
aagccttcactcatt

SEQ ID NO: 2129654 - DNA, 15 bp, Homo sapiens
agccttcactcattt

SEQ ID NO: 2129655 - DNA, 15 bp, Homo sapiens
gccttcactcatttt

SEQ ID NO: 2129656 - DNA, 15 bp, Homo sapiens
ccttcactcattttc

SEQ ID NO: 2129657 - DNA, 15 bp, Homo sapiens
cttcactcattttct

SEQ ID NO: 2129658 - DNA, 15 bp, Homo sapiens
ttcactcattttctt

SEQ ID NO: 2129659 - DNA, 15 bp, Homo sapiens
tcactcattttcttt

SEQ ID NO: 2129660 - DNA, 15 bp, Homo sapiens
cactcattttctttc

SEQ ID NO: 2129661 - DNA, 15 bp, Homo sapiens
actcattttctttca

SEQ ID NO: 2129662 - DNA, 15 bp, Homo sapiens
ctcattttctttcat

SEQ ID NO: 2129663 - DNA, 15 bp, Homo sapiens
tcattttctttcatt

SEQ ID NO: 2129664 - DNA, 15 bp, Homo sapiens
cattttctttcattt

SEQ ID NO: 2129665 - DNA, 15 bp, Homo sapiens
gtcccctttgtatat

SEQ ID NO: 2129666 - DNA, 15 bp, Homo sapiens
tcccctttgtatatt

SEQ ID NO: 2129667 - DNA, 15 bp, Homo sapiens
cccctttgtatattg

SEQ ID NO: 2129668 - DNA, 15 bp, Homo sapiens
ccctttgtatattgt

SEQ ID NO: 2129669 - DNA, 15 bp, Homo sapiens
cctttgtatattgtt

SEQ ID NO: 2129670 - DNA, 15 bp, Homo sapiens
ctttgtatattgtta

SEQ ID NO: 2129671 - DNA, 15 bp, Homo sapiens
tttgtatattgttat

SEQ ID NO: 2129672 - DNA, 15 bp, Homo sapiens
ttgtatattgttatt

SEQ ID NO: 2129673 - DNA, 15 bp, Homo sapiens
tgtatattgttattg

SEQ ID NO: 2129674 - DNA, 15 bp, Homo sapiens
gtatattgttattgt

SEQ ID NO: 2129675 - DNA, 15 bp, Homo sapiens
tatattgttattgta

SEQ ID NO: 2129676 - DNA, 15 bp, Homo sapiens
atattgttattgtaa

SEQ ID NO: 2129677 - DNA, 15 bp, Homo sapiens
tattgttattgtaaa

SEQ ID NO: 2129678 - DNA, 15 bp, Homo sapiens
attgttattgtaaag

SEQ ID NO: 2129679 - DNA, 15 bp, Homo sapiens
ttgttattgtaaagt

SEQ ID NO: 2129680 - DNA, 15 bp, Homo sapiens
tgttattgtaaagtg

SEQ ID NO: 2129681 - DNA, 15 bp, Homo sapiens
gttattgtaaagtgc

SEQ ID NO: 2129682 - DNA, 15 bp, Homo sapiens
ttattgtaaagtgcc

SEQ ID NO: 2129683 - DNA, 15 bp, Homo sapiens
tattgtaaagtgcca

SEQ ID NO: 2129684 - DNA, 15 bp, Homo sapiens
attgtaaagtgccaa

SEQ ID NO: 2129685 - DNA, 15 bp, Homo sapiens
ttgtaaagtgccaaa

SEQ ID NO: 2129686 - DNA, 15 bp, Homo sapiens
tgtaaagtgccaaat

SEQ ID NO: 2129687 - DNA, 15 bp, Homo sapiens
gtaaagtgccaaatg

SEQ ID NO: 2129688 - DNA, 15 bp, Homo sapiens
taaagtgccaaatgc

SEQ ID NO: 2129689 - DNA, 15 bp, Homo sapiens
aaagtgccaaatgcc

SEQ ID NO: 2129690 - DNA, 15 bp, Homo sapiens
aagtgccaaatgcca

SEQ ID NO: 2129691 - DNA, 15 bp, Homo sapiens
agtgccaaatgccag

SEQ ID NO: 2129692 - DNA, 15 bp, Homo sapiens
gtgccaaatgccagg

SEQ ID NO: 2129693 - DNA, 15 bp, Homo sapiens
tgccaaatgccagga

SEQ ID NO: 2129694 - DNA, 15 bp, Homo sapiens
gccaaatgccaggat

SEQ ID NO: 2129695 - DNA, 15 bp, Homo sapiens
ccaaatgccaggata

SEQ ID NO: 2129696 - DNA, 15 bp, Homo sapiens
caaatgccaggatac

SEQ ID NO: 2129697 - DNA, 15 bp, Homo sapiens
aaatgccaggataca

SEQ ID NO: 2129698 - DNA, 15 bp, Homo sapiens
aatgccaggatacag

SEQ ID NO: 2129699 - DNA, 15 bp, Homo sapiens
atgccaggatacagc

SEQ ID NO: 2129700 - DNA, 15 bp, Homo sapiens
tgccaggatacagcc

SEQ ID NO: 2129701 - DNA, 15 bp, Homo sapiens
gccaggatacagcca

SEQ ID NO: 2129702 - DNA, 15 bp, Homo sapiens
ccaggatacagccag

SEQ ID NO: 2129703 - DNA, 15 bp, Homo sapiens
caggatacagccaga

SEQ ID NO: 2129704 - DNA, 15 bp, Homo sapiens
aggatacagccagaa

SEQ ID NO: 2129705 - DNA, 15 bp, Homo sapiens
ggatacagccagaaa

SEQ ID NO: 2129706 - DNA, 15 bp, Homo sapiens
gatacagccagaaaa

SEQ ID NO: 2129707 - DNA, 15 bp, Homo sapiens
atacagccagaaaaa

SEQ ID NO: 2129708 - DNA, 15 bp, Homo sapiens
tacagccagaaaaat

SEQ ID NO: 2129709 - DNA, 15 bp, Homo sapiens
acagccagaaaaatt

SEQ ID NO: 2129710 - DNA, 15 bp, Homo sapiens
cagccagaaaaattg

SEQ ID NO: 2129711 - DNA, 15 bp, Homo sapiens
agccagaaaaattgc

SEQ ID NO: 2129712 - DNA, 15 bp, Homo sapiens
gccagaaaaattgct

SEQ ID NO: 2129713 - DNA, 15 bp, Homo sapiens
ccagaaaaattgctt

SEQ ID NO: 2129714 - DNA, 15 bp, Homo sapiens
cagaaaaattgctta

SEQ ID NO: 2129715 - DNA, 15 bp, Homo sapiens
agaaaaattgcttat

SEQ ID NO: 2129716 - DNA, 15 bp, Homo sapiens
gaaaaattgcttatt

SEQ ID NO: 2129717 - DNA, 15 bp, Homo sapiens
aaaaattgcttatta

SEQ ID NO: 2129718 - DNA, 15 bp, Homo sapiens
aaaattgcttattat

SEQ ID NO: 2129719 - DNA, 15 bp, Homo sapiens
aaattgcttattatt

SEQ ID NO: 2129720 - DNA, 15 bp, Homo sapiens
aattgcttattatta

SEQ ID NO: 2129721 - DNA, 15 bp, Homo sapiens
attgcttattattat

SEQ ID NO: 2129722 - DNA, 15 bp, Homo sapiens
ttgcttattattatt

SEQ ID NO: 2129723 - DNA, 15 bp, Homo sapiens
tgcttattattatta

SEQ ID NO: 2129724 - DNA, 15 bp, Homo sapiens
gcttattattattaa

SEQ ID NO: 2129725 - DNA, 15 bp, Homo sapiens
cttattattattaaa

SEQ ID NO: 2129726 - DNA, 15 bp, Homo sapiens
ttattattattaaaa

SEQ ID NO: 2129727 - DNA, 15 bp, Homo sapiens
tattattattaaaaa

SEQ ID NO: 2129728 - DNA, 15 bp, Homo sapiens
attattattaaaaaa

SEQ ID NO: 2129729 - DNA, 15 bp, Homo sapiens
ttattattaaaaaaa

SEQ ID NO: 2129730 - DNA, 15 bp, Homo sapiens
tattattaaaaaaat

SEQ ID NO: 2129731 - DNA, 15 bp, Homo sapiens
attattaaaaaaatt

SEQ ID NO: 2129732 - DNA, 15 bp, Homo sapiens
ttattaaaaaaattt

SEQ ID NO: 2129733 - DNA, 15 bp, Homo sapiens
tattaaaaaaatttt

SEQ ID NO: 2129734 - DNA, 15 bp, Homo sapiens
attaaaaaaattttt

SEQ ID NO: 2129735 - DNA, 15 bp, Homo sapiens
aaaaatttttttaag

SEQ ID NO: 2129736 - DNA, 15 bp, Homo sapiens
aaaatttttttaaga

SEQ ID NO: 2129737 - DNA, 15 bp, Homo sapiens
aaatttttttaagaa

SEQ ID NO: 2129738 - DNA, 15 bp, Homo sapiens
aatttttttaagaaa

SEQ ID NO: 2129739 - DNA, 15 bp, Homo sapiens
atttttttaagaaag

SEQ ID NO: 2129740 - DNA, 15 bp, Homo sapiens
tttttttaagaaaga

SEQ ID NO: 2129741 - DNA, 15 bp, Homo sapiens
ttttttaagaaagac

SEQ ID NO: 2129742 - DNA, 15 bp, Homo sapiens
tttttaagaaagaca

SEQ ID NO: 2129743 - DNA, 15 bp, Homo sapiens
ttttaagaaagacat

SEQ ID NO: 2129744 - DNA, 15 bp, Homo sapiens
tttaagaaagacatc

SEQ ID NO: 2129745 - DNA, 15 bp, Homo sapiens
ttaagaaagacatct

SEQ ID NO: 2129746 - DNA, 15 bp, Homo sapiens
taagaaagacatctg

SEQ ID NO: 2129747 - DNA, 15 bp, Homo sapiens
aagaaagacatctgg

SEQ ID NO: 2129748 - DNA, 15 bp, Homo sapiens
agaaagacatctgga

SEQ ID NO: 2129749 - DNA, 15 bp, Homo sapiens
gaaagacatctggat

SEQ ID NO: 2129750 - DNA, 15 bp, Homo sapiens
aaagacatctggatt

SEQ ID NO: 2129751 - DNA, 15 bp, Homo sapiens
aagacatctggattg

SEQ ID NO: 2129752 - DNA, 15 bp, Homo sapiens
agacatctggattgt

SEQ ID NO: 2129753 - DNA, 15 bp, Homo sapiens
gacatctggattgta

SEQ ID NO: 2129754 - DNA, 15 bp, Homo sapiens
acatctggattgtag

SEQ ID NO: 2129755 - DNA, 15 bp, Homo sapiens
catctggattgtagg

SEQ ID NO: 2129756 - DNA, 15 bp, Homo sapiens
atctggattgtaggg

SEQ ID NO: 2129757 - DNA, 15 bp, Homo sapiens
tctggattgtagggt

SEQ ID NO: 2129758 - DNA, 15 bp, Homo sapiens
ctggattgtagggtg

SEQ ID NO: 2129759 - DNA, 15 bp, Homo sapiens
tggattgtagggtgg

SEQ ID NO: 2129760 - DNA, 15 bp, Homo sapiens
ggattgtagggtgga

SEQ ID NO: 2129761 - DNA, 15 bp, Homo sapiens
gattgtagggtggac

SEQ ID NO: 2129762 - DNA, 15 bp, Homo sapiens
attgtagggtggact

SEQ ID NO: 2129763 - DNA, 15 bp, Homo sapiens
ttgtagggtggactc

SEQ ID NO: 2129764 - DNA, 15 bp, Homo sapiens
tgtagggtggactcg

SEQ ID NO: 2129765 - DNA, 15 bp, Homo sapiens
gtagggtggactcga

SEQ ID NO: 2129766 - DNA, 15 bp, Homo sapiens
tagggtggactcgat

SEQ ID NO: 2129767 - DNA, 15 bp, Homo sapiens
agggtggactcgata

SEQ ID NO: 2129768 - DNA, 15 bp, Homo sapiens
gggtggactcgataa

SEQ ID NO: 2129769 - DNA, 15 bp, Homo sapiens
ggtggactcgataac

SEQ ID NO: 2129770 - DNA, 15 bp, Homo sapiens
gtggactcgataacc

SEQ ID NO: 2129771 - DNA, 15 bp, Homo sapiens
tggactcgataacct

SEQ ID NO: 2129772 - DNA, 15 bp, Homo sapiens
ggactcgataacctg

SEQ ID NO: 2129773 - DNA, 15 bp, Homo sapiens
gactcgataacctgg

SEQ ID NO: 2129774 - DNA, 15 bp, Homo sapiens
actcgataacctggt

SEQ ID NO: 2129775 - DNA, 15 bp, Homo sapiens
ctcgataacctggtc

SEQ ID NO: 2129776 - DNA, 15 bp, Homo sapiens
tcgataacctggtca

SEQ ID NO: 2129777 - DNA, 15 bp, Homo sapiens
cgataacctggtcat

SEQ ID NO: 2129778 - DNA, 15 bp, Homo sapiens
gataacctggtcatt

SEQ ID NO: 2129779 - DNA, 15 bp, Homo sapiens
ataacctggtcatta

SEQ ID NO: 2129780 - DNA, 15 bp, Homo sapiens
taacctggtcattat

SEQ ID NO: 2129781 - DNA, 15 bp, Homo sapiens
aacctggtcattatt

SEQ ID NO: 2129782 - DNA, 15 bp, Homo sapiens
acctggtcattattt

SEQ ID NO: 2129783 - DNA, 15 bp, Homo sapiens
cctggtcattatttt

SEQ ID NO: 2129784 - DNA, 15 bp, Homo sapiens
ctggtcattattttt

SEQ ID NO: 2129785 - DNA, 15 bp, Homo sapiens
tggtcattatttttt

SEQ ID NO: 2129786 - DNA, 15 bp, Homo sapiens
ggtcattattttttt

SEQ ID NO: 2129787 - DNA, 15 bp, Homo sapiens
gtcattatttttttg

SEQ ID NO: 2129788 - DNA, 15 bp, Homo sapiens
tcattatttttttga

SEQ ID NO: 2129789 - DNA, 15 bp, Homo sapiens
cattatttttttgaa

SEQ ID NO: 2129790 - DNA, 15 bp, Homo sapiens
attatttttttgaag

SEQ ID NO: 2129791 - DNA, 15 bp, Homo sapiens
ttatttttttgaagc

SEQ ID NO: 2129792 - DNA, 15 bp, Homo sapiens
tatttttttgaagcc

SEQ ID NO: 2129793 - DNA, 15 bp, Homo sapiens
atttttttgaagcca

SEQ ID NO: 2129794 - DNA, 15 bp, Homo sapiens
tttttttgaagccaa

SEQ ID NO: 2129795 - DNA, 15 bp, Homo sapiens
ttttttgaagccaaa

SEQ ID NO: 2129796 - DNA, 15 bp, Homo sapiens
tttttgaagccaaaa

SEQ ID NO: 2129797 - DNA, 15 bp, Homo sapiens
ttttgaagccaaaat

SEQ ID NO: 2129798 - DNA, 15 bp, Homo sapiens
tttgaagccaaaata

SEQ ID NO: 2129799 - DNA, 15 bp, Homo sapiens
ttgaagccaaaatat

SEQ ID NO: 2129800 - DNA, 15 bp, Homo sapiens
tgaagccaaaatatc

SEQ ID NO: 2129801 - DNA, 15 bp, Homo sapiens
gaagccaaaatatcc

SEQ ID NO: 2129802 - DNA, 15 bp, Homo sapiens
aagccaaaatatcca

SEQ ID NO: 2129803 - DNA, 15 bp, Homo sapiens
agccaaaatatccat

SEQ ID NO: 2129804 - DNA, 15 bp, Homo sapiens
gccaaaatatccatt

SEQ ID NO: 2129805 - DNA, 15 bp, Homo sapiens
ccaaaatatccattt

SEQ ID NO: 2129806 - DNA, 15 bp, Homo sapiens
caaaatatccattta

SEQ ID NO: 2129807 - DNA, 15 bp, Homo sapiens
aaaatatccatttat

SEQ ID NO: 2129808 - DNA, 15 bp, Homo sapiens
aaatatccatttata

SEQ ID NO: 2129809 - DNA, 15 bp, Homo sapiens
aatatccatttatac

SEQ ID NO: 2129810 - DNA, 15 bp, Homo sapiens
atatccatttatact

SEQ ID NO: 2129811 - DNA, 15 bp, Homo sapiens
tatccatttatacta

SEQ ID NO: 2129812 - DNA, 15 bp, Homo sapiens
atccatttatactat

SEQ ID NO: 2129813 - DNA, 15 bp, Homo sapiens
tccatttatactatg

SEQ ID NO: 2129814 - DNA, 15 bp, Homo sapiens
ccatttatactatgt

SEQ ID NO: 2129815 - DNA, 15 bp, Homo sapiens
catttatactatgta

SEQ ID NO: 2129816 - DNA, 15 bp, Homo sapiens
atttatactatgtac

SEQ ID NO: 2129817 - DNA, 15 bp, Homo sapiens
tttatactatgtacc

SEQ ID NO: 2129818 - DNA, 15 bp, Homo sapiens
ttatactatgtacct

SEQ ID NO: 2129819 - DNA, 15 bp, Homo sapiens
tatactatgtacctg

SEQ ID NO: 2129820 - DNA, 15 bp, Homo sapiens
atactatgtacctgg

SEQ ID NO: 2129821 - DNA, 15 bp, Homo sapiens
tactatgtacctggt

SEQ ID NO: 2129822 - DNA, 15 bp, Homo sapiens
actatgtacctggtg

SEQ ID NO: 2129823 - DNA, 15 bp, Homo sapiens
ctatgtacctggtga

SEQ ID NO: 2129824 - DNA, 15 bp, Homo sapiens
tatgtacctggtgac

SEQ ID NO: 2129825 - DNA, 15 bp, Homo sapiens
atgtacctggtgacc

SEQ ID NO: 2129826 - DNA, 15 bp, Homo sapiens
tgtacctggtgacca

SEQ ID NO: 2129827 - DNA, 15 bp, Homo sapiens
gtacctggtgaccag

SEQ ID NO: 2129828 - DNA, 15 bp, Homo sapiens
tacctggtgaccagt

SEQ ID NO: 2129829 - DNA, 15 bp, Homo sapiens
acctggtgaccagtg

SEQ ID NO: 2129830 - DNA, 15 bp, Homo sapiens
cctggtgaccagtgt

SEQ ID NO: 2129831 - DNA, 15 bp, Homo sapiens
ctggtgaccagtgtc

SEQ ID NO: 2129832 - DNA, 15 bp, Homo sapiens
tggtgaccagtgtct

SEQ ID NO: 2129833 - DNA, 15 bp, Homo sapiens
ggtgaccagtgtctc

SEQ ID NO: 2129834 - DNA, 15 bp, Homo sapiens
gtgaccagtgtctct

SEQ ID NO: 2129835 - DNA, 15 bp, Homo sapiens
tgaccagtgtctctc

SEQ ID NO: 2129836 - DNA, 15 bp, Homo sapiens
gaccagtgtctctca

SEQ ID NO: 2129837 - DNA, 15 bp, Homo sapiens
accagtgtctctcat

SEQ ID NO: 2129838 - DNA, 15 bp, Homo sapiens
ccagtgtctctcatt

SEQ ID NO: 2129839 - DNA, 15 bp, Homo sapiens
cagtgtctctcattt

SEQ ID NO: 2129840 - DNA, 15 bp, Homo sapiens
agtgtctctcatttt

SEQ ID NO: 2129841 - DNA, 15 bp, Homo sapiens
gtgtctctcatttta

SEQ ID NO: 2129842 - DNA, 15 bp, Homo sapiens
tgtctctcattttaa

SEQ ID NO: 2129843 - DNA, 15 bp, Homo sapiens
gtctctcattttaac

SEQ ID NO: 2129844 - DNA, 15 bp, Homo sapiens
tctctcattttaact

SEQ ID NO: 2129845 - DNA, 15 bp, Homo sapiens
ctctcattttaactg

SEQ ID NO: 2129846 - DNA, 15 bp, Homo sapiens
tctcattttaactga

SEQ ID NO: 2129847 - DNA, 15 bp, Homo sapiens
ctcattttaactgag

SEQ ID NO: 2129848 - DNA, 15 bp, Homo sapiens
tcattttaactgagg

SEQ ID NO: 2129849 - DNA, 15 bp, Homo sapiens
cattttaactgaggg

SEQ ID NO: 2129850 - DNA, 15 bp, Homo sapiens
attttaactgagggt

SEQ ID NO: 2129851 - DNA, 15 bp, Homo sapiens
ttttaactgagggtg

SEQ ID NO: 2129852 - DNA, 15 bp, Homo sapiens
tttaactgagggtgg

SEQ ID NO: 2129853 - DNA, 15 bp, Homo sapiens
ttaactgagggtggt

SEQ ID NO: 2129854 - DNA, 15 bp, Homo sapiens
taactgagggtggtg

SEQ ID NO: 2129855 - DNA, 15 bp, Homo sapiens
aactgagggtggtgg

SEQ ID NO: 2129856 - DNA, 15 bp, Homo sapiens
actgagggtggtggg

SEQ ID NO: 2129857 - DNA, 15 bp, Homo sapiens
ctgagggtggtgggt

SEQ ID NO: 2129858 - DNA, 15 bp, Homo sapiens
tgagggtggtgggtc

SEQ ID NO: 2129859 - DNA, 15 bp, Homo sapiens
gagggtggtgggtct

SEQ ID NO: 2129860 - DNA, 15 bp, Homo sapiens
agggtggtgggtctg

SEQ ID NO: 2129861 - DNA, 15 bp, Homo sapiens
gggtggtgggtctgt

SEQ ID NO: 2129862 - DNA, 15 bp, Homo sapiens
ggtggtgggtctgtg

SEQ ID NO: 2129863 - DNA, 15 bp, Homo sapiens
gtggtgggtctgtgg

SEQ ID NO: 2129864 - DNA, 15 bp, Homo sapiens
tggtgggtctgtgga

SEQ ID NO: 2129865 - DNA, 15 bp, Homo sapiens
ggtgggtctgtggat

SEQ ID NO: 2129866 - DNA, 15 bp, Homo sapiens
gtgggtctgtggata

SEQ ID NO: 2129867 - DNA, 15 bp, Homo sapiens
tgggtctgtggatag

SEQ ID NO: 2129868 - DNA, 15 bp, Homo sapiens
gggtctgtggataga

SEQ ID NO: 2129869 - DNA, 15 bp, Homo sapiens
ggtctgtggatagaa

SEQ ID NO: 2129870 - DNA, 15 bp, Homo sapiens
gtctgtggatagaac

SEQ ID NO: 2129871 - DNA, 15 bp, Homo sapiens
tctgtggatagaaca

SEQ ID NO: 2129872 - DNA, 15 bp, Homo sapiens
ctgtggatagaacac

SEQ ID NO: 2129873 - DNA, 15 bp, Homo sapiens
tgtggatagaacact

SEQ ID NO: 2129874 - DNA, 15 bp, Homo sapiens
gtggatagaacactg

SEQ ID NO: 2129875 - DNA, 15 bp, Homo sapiens
tggatagaacactga

SEQ ID NO: 2129876 - DNA, 15 bp, Homo sapiens
ggatagaacactgac

SEQ ID NO: 2129877 - DNA, 15 bp, Homo sapiens
gatagaacactgact

SEQ ID NO: 2129878 - DNA, 15 bp, Homo sapiens
atagaacactgactc

SEQ ID NO: 2129879 - DNA, 15 bp, Homo sapiens
tagaacactgactct

SEQ ID NO: 2129880 - DNA, 15 bp, Homo sapiens
agaacactgactctt

SEQ ID NO: 2129881 - DNA, 15 bp, Homo sapiens
gaacactgactcttg

SEQ ID NO: 2129882 - DNA, 15 bp, Homo sapiens
aacactgactcttgc

SEQ ID NO: 2129883 - DNA, 15 bp, Homo sapiens
acactgactcttgct

SEQ ID NO: 2129884 - DNA, 15 bp, Homo sapiens
cactgactcttgcta

SEQ ID NO: 2129885 - DNA, 15 bp, Homo sapiens
actgactcttgctat

SEQ ID NO: 2129886 - DNA, 15 bp, Homo sapiens
ctgactcttgctatt

SEQ ID NO: 2129887 - DNA, 15 bp, Homo sapiens
tgactcttgctattt

SEQ ID NO: 2129888 - DNA, 15 bp, Homo sapiens
gactcttgctatttt

SEQ ID NO: 2129889 - DNA, 15 bp, Homo sapiens
actcttgctatttta

SEQ ID NO: 2129890 - DNA, 15 bp, Homo sapiens
ctcttgctattttaa

SEQ ID NO: 2129891 - DNA, 15 bp, Homo sapiens
tcttgctattttaat

SEQ ID NO: 2129892 - DNA, 15 bp, Homo sapiens
cttgctattttaata

SEQ ID NO: 2129893 - DNA, 15 bp, Homo sapiens
ttgctattttaatat

SEQ ID NO: 2129894 - DNA, 15 bp, Homo sapiens
tgctattttaatatc

SEQ ID NO: 2129895 - DNA, 15 bp, Homo sapiens
gctattttaatatca

SEQ ID NO: 2129896 - DNA, 15 bp, Homo sapiens
ctattttaatatcaa

SEQ ID NO: 2129897 - DNA, 15 bp, Homo sapiens
tattttaatatcaaa

SEQ ID NO: 2129898 - DNA, 15 bp, Homo sapiens
attttaatatcaaag

SEQ ID NO: 2129899 - DNA, 15 bp, Homo sapiens
ttttaatatcaaaga

SEQ ID NO: 2129900 - DNA, 15 bp, Homo sapiens
tttaatatcaaagat

SEQ ID NO: 2129901 - DNA, 15 bp, Homo sapiens
ttaatatcaaagata

SEQ ID NO: 2129902 - DNA, 15 bp, Homo sapiens
taatatcaaagatat

SEQ ID NO: 2129903 - DNA, 15 bp, Homo sapiens
aatatcaaagatatt

SEQ ID NO: 2129904 - DNA, 15 bp, Homo sapiens
atatcaaagatattc

SEQ ID NO: 2129905 - DNA, 15 bp, Homo sapiens
tatcaaagatattct

SEQ ID NO: 2129906 - DNA, 15 bp, Homo sapiens
atcaaagatattcta

SEQ ID NO: 2129907 - DNA, 15 bp, Homo sapiens
tcaaagatattctag

SEQ ID NO: 2129908 - DNA, 15 bp, Homo sapiens
caaagatattctaga

SEQ ID NO: 2129909 - DNA, 15 bp, Homo sapiens
aaagatattctagag

SEQ ID NO: 2129910 - DNA, 15 bp, Homo sapiens
aagatattctagagt

SEQ ID NO: 2129911 - DNA, 15 bp, Homo sapiens
agatattctagagtg

SEQ ID NO: 2129912 - DNA, 15 bp, Homo sapiens
gatattctagagtgg

SEQ ID NO: 2129913 - DNA, 15 bp, Homo sapiens
atattctagagtgga

SEQ ID NO: 2129914 - DNA, 15 bp, Homo sapiens
tattctagagtggaa

SEQ ID NO: 2129915 - DNA, 15 bp, Homo sapiens
attctagagtggaac

SEQ ID NO: 2129916 - DNA, 15 bp, Homo sapiens
ttctagagtggaact

SEQ ID NO: 2129917 - DNA, 15 bp, Homo sapiens
tctagagtggaactc

SEQ ID NO: 2129918 - DNA, 15 bp, Homo sapiens
ctagagtggaactct

SEQ ID NO: 2129919 - DNA, 15 bp, Homo sapiens
tagagtggaactctt

SEQ ID NO: 2129920 - DNA, 15 bp, Homo sapiens
agagtggaactctta

SEQ ID NO: 2129921 - DNA, 15 bp, Homo sapiens
gagtggaactcttaa

SEQ ID NO: 2129922 - DNA, 15 bp, Homo sapiens
agtggaactcttaag

SEQ ID NO: 2129923 - DNA, 15 bp, Homo sapiens
gtggaactcttaaga

SEQ ID NO: 2129924 - DNA, 15 bp, Homo sapiens
tggaactcttaagac

SEQ ID NO: 2129925 - DNA, 15 bp, Homo sapiens
ggaactcttaagacc

SEQ ID NO: 2129926 - DNA, 15 bp, Homo sapiens
gaactcttaagacca

SEQ ID NO: 2129927 - DNA, 15 bp, Homo sapiens
aactcttaagaccag

SEQ ID NO: 2129928 - DNA, 15 bp, Homo sapiens
actcttaagaccagt

SEQ ID NO: 2129929 - DNA, 15 bp, Homo sapiens
ctcttaagaccagta

SEQ ID NO: 2129930 - DNA, 15 bp, Homo sapiens
tcttaagaccagtat

SEQ ID NO: 2129931 - DNA, 15 bp, Homo sapiens
cttaagaccagtatc

SEQ ID NO: 2129932 - DNA, 15 bp, Homo sapiens
ttaagaccagtatct

SEQ ID NO: 2129933 - DNA, 15 bp, Homo sapiens
taagaccagtatctt

SEQ ID NO: 2129934 - DNA, 15 bp, Homo sapiens
aagaccagtatcttt

SEQ ID NO: 2129935 - DNA, 15 bp, Homo sapiens
agaccagtatctttg

SEQ ID NO: 2129936 - DNA, 15 bp, Homo sapiens
gaccagtatctttgt

SEQ ID NO: 2129937 - DNA, 15 bp, Homo sapiens
accagtatctttgtg

SEQ ID NO: 2129938 - DNA, 15 bp, Homo sapiens
ccagtatctttgtgt

SEQ ID NO: 2129939 - DNA, 15 bp, Homo sapiens
cagtatctttgtgtg

SEQ ID NO: 2129940 - DNA, 15 bp, Homo sapiens
agtatctttgtgtgg

SEQ ID NO: 2129941 - DNA, 15 bp, Homo sapiens
gtatctttgtgtggg

SEQ ID NO: 2129942 - DNA, 15 bp, Homo sapiens
tatctttgtgtgggc

SEQ ID NO: 2129943 - DNA, 15 bp, Homo sapiens
atctttgtgtgggct

SEQ ID NO: 2129944 - DNA, 15 bp, Homo sapiens
tctttgtgtgggctt

SEQ ID NO: 2129945 - DNA, 15 bp, Homo sapiens
ctttgtgtgggcttt

SEQ ID NO: 2129946 - DNA, 15 bp, Homo sapiens
tttgtgtgggcttta

SEQ ID NO: 2129947 - DNA, 15 bp, Homo sapiens
ttgtgtgggctttac

SEQ ID NO: 2129948 - DNA, 15 bp, Homo sapiens
tgtgtgggctttacc

SEQ ID NO: 2129949 - DNA, 15 bp, Homo sapiens
gtgtgggctttacca

SEQ ID NO: 2129950 - DNA, 15 bp, Homo sapiens
tgtgggctttaccag

SEQ ID NO: 2129951 - DNA, 15 bp, Homo sapiens
gtgggctttaccagc

SEQ ID NO: 2129952 - DNA, 15 bp, Homo sapiens
tgggctttaccagca

SEQ ID NO: 2129953 - DNA, 15 bp, Homo sapiens
gggctttaccagcat

SEQ ID NO: 2129954 - DNA, 15 bp, Homo sapiens
ggctttaccagcatt

SEQ ID NO: 2129955 - DNA, 15 bp, Homo sapiens
gctttaccagcattc

SEQ ID NO: 2129956 - DNA, 15 bp, Homo sapiens
ctttaccagcattca

SEQ ID NO: 2129957 - DNA, 15 bp, Homo sapiens
tttaccagcattcac

SEQ ID NO: 2129958 - DNA, 15 bp, Homo sapiens
ttaccagcattcact

SEQ ID NO: 2129959 - DNA, 15 bp, Homo sapiens
taccagcattcactt

SEQ ID NO: 2129960 - DNA, 15 bp, Homo sapiens
accagcattcacttt

SEQ ID NO: 2129961 - DNA, 15 bp, Homo sapiens
ccagcattcactttt

SEQ ID NO: 2129962 - DNA, 15 bp, Homo sapiens
cagcattcactttta

SEQ ID NO: 2129963 - DNA, 15 bp, Homo sapiens
agcattcacttttag

SEQ ID NO: 2129964 - DNA, 15 bp, Homo sapiens
gcattcacttttaga

SEQ ID NO: 2129965 - DNA, 15 bp, Homo sapiens
cattcacttttagaa

SEQ ID NO: 2129966 - DNA, 15 bp, Homo sapiens
attcacttttagaaa

SEQ ID NO: 2129967 - DNA, 15 bp, Homo sapiens
ttcacttttagaaaa

SEQ ID NO: 2129968 - DNA, 15 bp, Homo sapiens
tcacttttagaaaaa

SEQ ID NO: 2129969 - DNA, 15 bp, Homo sapiens
cacttttagaaaaac

SEQ ID NO: 2129970 - DNA, 15 bp, Homo sapiens
acttttagaaaaact

SEQ ID NO: 2129971 - DNA, 15 bp, Homo sapiens
cttttagaaaaacta

SEQ ID NO: 2129972 - DNA, 15 bp, Homo sapiens
ttttagaaaaactac

SEQ ID NO: 2129973 - DNA, 15 bp, Homo sapiens
tttagaaaaactacc

SEQ ID NO: 2129974 - DNA, 15 bp, Homo sapiens
ttagaaaaactacct

SEQ ID NO: 2129975 - DNA, 15 bp, Homo sapiens
tagaaaaactaccta

SEQ ID NO: 2129976 - DNA, 15 bp, Homo sapiens
agaaaaactacctaa

SEQ ID NO: 2129977 - DNA, 15 bp, Homo sapiens
gaaaaactacctaaa

SEQ ID NO: 2129978 - DNA, 15 bp, Homo sapiens
aaaaactacctaaat

SEQ ID NO: 2129979 - DNA, 15 bp, Homo sapiens
aaaactacctaaatt

SEQ ID NO: 2129980 - DNA, 15 bp, Homo sapiens
aaactacctaaattt

SEQ ID NO: 2129981 - DNA, 15 bp, Homo sapiens
aactacctaaatttt

SEQ ID NO: 2129982 - DNA, 15 bp, Homo sapiens
actacctaaatttta

SEQ ID NO: 2129983 - DNA, 15 bp, Homo sapiens
ctacctaaattttat

SEQ ID NO: 2129984 - DNA, 15 bp, Homo sapiens
tacctaaattttata

SEQ ID NO: 2129985 - DNA, 15 bp, Homo sapiens
acctaaattttataa

SEQ ID NO: 2129986 - DNA, 15 bp, Homo sapiens
cctaaattttataat

SEQ ID NO: 2129987 - DNA, 15 bp, Homo sapiens
ctaaattttataatc

SEQ ID NO: 2129988 - DNA, 15 bp, Homo sapiens
taaattttataatcc

SEQ ID NO: 2129989 - DNA, 15 bp, Homo sapiens
aaattttataatcct

SEQ ID NO: 2129990 - DNA, 15 bp, Homo sapiens
aattttataatcctt

SEQ ID NO: 2129991 - DNA, 15 bp, Homo sapiens
attttataatccttt

SEQ ID NO: 2129992 - DNA, 15 bp, Homo sapiens
ttttataatccttta

SEQ ID NO: 2129993 - DNA, 15 bp, Homo sapiens
tttataatcctttaa

SEQ ID NO: 2129994 - DNA, 15 bp, Homo sapiens
ttataatcctttaat

SEQ ID NO: 2129995 - DNA, 15 bp, Homo sapiens
tataatcctttaatt

SEQ ID NO: 2129996 - DNA, 15 bp, Homo sapiens
ataatcctttaattt

SEQ ID NO: 2129997 - DNA, 15 bp, Homo sapiens
taatcctttaatttc

SEQ ID NO: 2129998 - DNA, 15 bp, Homo sapiens
aatcctttaatttct

SEQ ID NO: 2129999 - DNA, 15 bp, Homo sapiens
atcctttaatttctt

SEQ ID NO: 2130000 - DNA, 15 bp, Homo sapiens
tcctttaatttcttc

SEQ ID NO: 2130001 - DNA, 15 bp, Homo sapiens
cctttaatttcttca

SEQ ID NO: 2130002 - DNA, 15 bp, Homo sapiens
ctttaatttcttcat

SEQ ID NO: 2130003 - DNA, 15 bp, Homo sapiens
tttaatttcttcatc

SEQ ID NO: 2130004 - DNA, 15 bp, Homo sapiens
ttaatttcttcatct

SEQ ID NO: 2130005 - DNA, 15 bp, Homo sapiens
taatttcttcatctg

SEQ ID NO: 2130006 - DNA, 15 bp, Homo sapiens
aatttcttcatctgg

SEQ ID NO: 2130007 - DNA, 15 bp, Homo sapiens
atttcttcatctgga

SEQ ID NO: 2130008 - DNA, 15 bp, Homo sapiens
tttcttcatctggag

SEQ ID NO: 2130009 - DNA, 15 bp, Homo sapiens
ttcttcatctggagc

SEQ ID NO: 2130010 - DNA, 15 bp, Homo sapiens
tcttcatctggagca

SEQ ID NO: 2130011 - DNA, 15 bp, Homo sapiens
cttcatctggagcac

SEQ ID NO: 2130012 - DNA, 15 bp, Homo sapiens
ttcatctggagcacc

SEQ ID NO: 2130013 - DNA, 15 bp, Homo sapiens
tcatctggagcacct

SEQ ID NO: 2130014 - DNA, 15 bp, Homo sapiens
catctggagcacctg

SEQ ID NO: 2130015 - DNA, 15 bp, Homo sapiens
atctggagcacctgc

SEQ ID NO: 2130016 - DNA, 15 bp, Homo sapiens
tctggagcacctgcc

SEQ ID NO: 2130017 - DNA, 15 bp, Homo sapiens
ctggagcacctgccc

SEQ ID NO: 2130018 - DNA, 15 bp, Homo sapiens
tggagcacctgcccc

SEQ ID NO: 2130019 - DNA, 15 bp, Homo sapiens
ggagcacctgcccct

SEQ ID NO: 2130020 - DNA, 15 bp, Homo sapiens
gagcacctgccccta

SEQ ID NO: 2130021 - DNA, 15 bp, Homo sapiens
agcacctgcccctac

SEQ ID NO: 2130022 - DNA, 15 bp, Homo sapiens
gcacctgcccctact

SEQ ID NO: 2130023 - DNA, 15 bp, Homo sapiens
cacctgcccctactt

SEQ ID NO: 2130024 - DNA, 15 bp, Homo sapiens
acctgcccctactta

SEQ ID NO: 2130025 - DNA, 15 bp, Homo sapiens
cctgcccctacttat

SEQ ID NO: 2130026 - DNA, 15 bp, Homo sapiens
ctgcccctacttatt

SEQ ID NO: 2130027 - DNA, 15 bp, Homo sapiens
tgcccctacttattt

SEQ ID NO: 2130028 - DNA, 15 bp, Homo sapiens
gcccctacttatttc

SEQ ID NO: 2130029 - DNA, 15 bp, Homo sapiens
cccctacttatttca

SEQ ID NO: 2130030 - DNA, 15 bp, Homo sapiens
ccctacttatttcaa

SEQ ID NO: 2130031 - DNA, 15 bp, Homo sapiens
cctacttatttcaag

SEQ ID NO: 2130032 - DNA, 15 bp, Homo sapiens
ctacttatttcaaga

SEQ ID NO: 2130033 - DNA, 15 bp, Homo sapiens
tacttatttcaagaa

SEQ ID NO: 2130034 - DNA, 15 bp, Homo sapiens
acttatttcaagaag

SEQ ID NO: 2130035 - DNA, 15 bp, Homo sapiens
cttatttcaagaaga

SEQ ID NO: 2130036 - DNA, 15 bp, Homo sapiens
ttatttcaagaagat

SEQ ID NO: 2130037 - DNA, 15 bp, Homo sapiens
tatttcaagaagatt

SEQ ID NO: 2130038 - DNA, 15 bp, Homo sapiens
atttcaagaagattg

SEQ ID NO: 2130039 - DNA, 15 bp, Homo sapiens
tttcaagaagattgc

SEQ ID NO: 2130040 - DNA, 15 bp, Homo sapiens
ttcaagaagattgca

SEQ ID NO: 2130041 - DNA, 15 bp, Homo sapiens
tcaagaagattgcag

SEQ ID NO: 2130042 - DNA, 15 bp, Homo sapiens
caagaagattgcagt

SEQ ID NO: 2130043 - DNA, 15 bp, Homo sapiens
aagaagattgcagta

SEQ ID NO: 2130044 - DNA, 15 bp, Homo sapiens
agaagattgcagtaa

SEQ ID NO: 2130045 - DNA, 15 bp, Homo sapiens
gaagattgcagtaaa

SEQ ID NO: 2130046 - DNA, 15 bp, Homo sapiens
aagattgcagtaaaa

SEQ ID NO: 2130047 - DNA, 15 bp, Homo sapiens
agattgcagtaaaac

SEQ ID NO: 2130048 - DNA, 15 bp, Homo sapiens
gattgcagtaaaacg

SEQ ID NO: 2130049 - DNA, 15 bp, Homo sapiens
attgcagtaaaacga

SEQ ID NO: 2130050 - DNA, 15 bp, Homo sapiens
ttgcagtaaaacgat

SEQ ID NO: 2130051 - DNA, 15 bp, Homo sapiens
tgcagtaaaacgatt

SEQ ID NO: 2130052 - DNA, 15 bp, Homo sapiens
gcagtaaaacgatta

SEQ ID NO: 2130053 - DNA, 15 bp, Homo sapiens
cagtaaaacgattaa

SEQ ID NO: 2130054 - DNA, 15 bp, Homo sapiens
agtaaaacgattaaa

SEQ ID NO: 2130055 - DNA, 15 bp, Homo sapiens
gtaaaacgattaaat

SEQ ID NO: 2130056 - DNA, 15 bp, Homo sapiens
taaaacgattaaatg

SEQ ID NO: 2130057 - DNA, 15 bp, Homo sapiens
aaaacgattaaatga

SEQ ID NO: 2130058 - DNA, 15 bp, Homo sapiens
aaacgattaaatgag

SEQ ID NO: 2130059 - DNA, 15 bp, Homo sapiens
aacgattaaatgagg

SEQ ID NO: 2130060 - DNA, 15 bp, Homo sapiens
acgattaaatgaggg

SEQ ID NO: 2130061 - DNA, 15 bp, Homo sapiens
cgattaaatgaggga

SEQ ID NO: 2130062 - DNA, 15 bp, Homo sapiens
gattaaatgagggaa

SEQ ID NO: 2130063 - DNA, 15 bp, Homo sapiens
attaaatgagggaac

SEQ ID NO: 2130064 - DNA, 15 bp, Homo sapiens
ttaaatgagggaaca

SEQ ID NO: 2130065 - DNA, 15 bp, Homo sapiens
taaatgagggaacat

SEQ ID NO: 2130066 - DNA, 15 bp, Homo sapiens
aaatgagggaacata

SEQ ID NO: 2130067 - DNA, 15 bp, Homo sapiens
aatgagggaacatat

SEQ ID NO: 2130068 - DNA, 15 bp, Homo sapiens
atgagggaacatatg

SEQ ID NO: 2130069 - DNA, 15 bp, Homo sapiens
tgagggaacatatgc

SEQ ID NO: 2130070 - DNA, 15 bp, Homo sapiens
gagggaacatatgca

SEQ ID NO: 2130071 - DNA, 15 bp, Homo sapiens
agggaacatatgcag

SEQ ID NO: 2130072 - DNA, 15 bp, Homo sapiens
gggaacatatgcaga

SEQ ID NO: 2130073 - DNA, 15 bp, Homo sapiens
ggaacatatgcagag

SEQ ID NO: 2130074 - DNA, 15 bp, Homo sapiens
gaacatatgcagagg

SEQ ID NO: 2130075 - DNA, 15 bp, Homo sapiens
aacatatgcagaggt

SEQ ID NO: 2130076 - DNA, 15 bp, Homo sapiens
acatatgcagaggtg

SEQ ID NO: 2130077 - DNA, 15 bp, Homo sapiens
catatgcagaggtgc

SEQ ID NO: 2130078 - DNA, 15 bp, Homo sapiens
atatgcagaggtgct

SEQ ID NO: 2130079 - DNA, 15 bp, Homo sapiens
tatgcagaggtgctt

SEQ ID NO: 2130080 - DNA, 15 bp, Homo sapiens
atgcagaggtgcttt

SEQ ID NO: 2130081 - DNA, 15 bp, Homo sapiens
tgcagaggtgctttt

SEQ ID NO: 2130082 - DNA, 15 bp, Homo sapiens
gcagaggtgctttta

SEQ ID NO: 2130083 - DNA, 15 bp, Homo sapiens
cagaggtgcttttaa

SEQ ID NO: 2130084 - DNA, 15 bp, Homo sapiens
agaggtgcttttaaa

SEQ ID NO: 2130085 - DNA, 15 bp, Homo sapiens
gaggtgcttttaaaa

SEQ ID NO: 2130086 - DNA, 15 bp, Homo sapiens
aggtgcttttaaaaa

SEQ ID NO: 2130087 - DNA, 15 bp, Homo sapiens
ggtgcttttaaaaag

SEQ ID NO: 2130088 - DNA, 15 bp, Homo sapiens
gtgcttttaaaaagc

SEQ ID NO: 2130089 - DNA, 15 bp, Homo sapiens
tgcttttaaaaagca

SEQ ID NO: 2130090 - DNA, 15 bp, Homo sapiens
gcttttaaaaagcat

SEQ ID NO: 2130091 - DNA, 15 bp, Homo sapiens
cttttaaaaagcata

SEQ ID NO: 2130092 - DNA, 15 bp, Homo sapiens
ttttaaaaagcatat

SEQ ID NO: 2130093 - DNA, 15 bp, Homo sapiens
tttaaaaagcatatg

SEQ ID NO: 2130094 - DNA, 15 bp, Homo sapiens
ttaaaaagcatatgc

SEQ ID NO: 2130095 - DNA, 15 bp, Homo sapiens
taaaaagcatatgcc

SEQ ID NO: 2130096 - DNA, 15 bp, Homo sapiens
aaaaagcatatgcca

SEQ ID NO: 2130097 - DNA, 15 bp, Homo sapiens
aaaagcatatgccac

SEQ ID NO: 2130098 - DNA, 15 bp, Homo sapiens
aaagcatatgccacc

SEQ ID NO: 2130099 - DNA, 15 bp, Homo sapiens
aagcatatgccacct

SEQ ID NO: 2130100 - DNA, 15 bp, Homo sapiens
agcatatgccacctt

SEQ ID NO: 2130101 - DNA, 15 bp, Homo sapiens
gcatatgccaccttt

SEQ ID NO: 2130102 - DNA, 15 bp, Homo sapiens
catatgccacctttt

SEQ ID NO: 2130103 - DNA, 15 bp, Homo sapiens
atatgccaccttttt

SEQ ID NO: 2130104 - DNA, 15 bp, Homo sapiens
tatgccacctttttt

SEQ ID NO: 2130105 - DNA, 15 bp, Homo sapiens
atgccacctttttta

SEQ ID NO: 2130106 - DNA, 15 bp, Homo sapiens
tgccaccttttttat

SEQ ID NO: 2130107 - DNA, 15 bp, Homo sapiens
gccaccttttttatt

SEQ ID NO: 2130108 - DNA, 15 bp, Homo sapiens
ccaccttttttatta

SEQ ID NO: 2130109 - DNA, 15 bp, Homo sapiens
caccttttttattaa

SEQ ID NO: 2130110 - DNA, 15 bp, Homo sapiens
accttttttattaat

SEQ ID NO: 2130111 - DNA, 15 bp, Homo sapiens
ccttttttattaatt

SEQ ID NO: 2130112 - DNA, 15 bp, Homo sapiens
cttttttattaatta

SEQ ID NO: 2130113 - DNA, 15 bp, Homo sapiens
ttttttattaattat

SEQ ID NO: 2130114 - DNA, 15 bp, Homo sapiens
tttttattaattatt

SEQ ID NO: 2130115 - DNA, 15 bp, Homo sapiens
ttttattaattatta

SEQ ID NO: 2130116 - DNA, 15 bp, Homo sapiens
tttattaattattat

SEQ ID NO: 2130117 - DNA, 15 bp, Homo sapiens
ttattaattattata

SEQ ID NO: 2130118 - DNA, 15 bp, Homo sapiens
tattaattattatat

SEQ ID NO: 2130119 - DNA, 15 bp, Homo sapiens
attaattattatata

SEQ ID NO: 2130120 - DNA, 15 bp, Homo sapiens
ttaattattatataa

SEQ ID NO: 2130121 - DNA, 15 bp, Homo sapiens
taattattatataaa

SEQ ID NO: 2130122 - DNA, 15 bp, Homo sapiens
aattattatataaaa

SEQ ID NO: 2130123 - DNA, 15 bp, Homo sapiens
attattatataaaat

SEQ ID NO: 2130124 - DNA, 15 bp, Homo sapiens
ttattatataaaatg

SEQ ID NO: 2130125 - DNA, 15 bp, Homo sapiens
tattatataaaatga

SEQ ID NO: 2130126 - DNA, 15 bp, Homo sapiens
attatataaaatgaa

SEQ ID NO: 2130127 - DNA, 15 bp, Homo sapiens
ttatataaaatgaag

SEQ ID NO: 2130128 - DNA, 15 bp, Homo sapiens
tatataaaatgaagc

SEQ ID NO: 2130129 - DNA, 15 bp, Homo sapiens
atataaaatgaagca

SEQ ID NO: 2130130 - DNA, 15 bp, Homo sapiens
tataaaatgaagcat

SEQ ID NO: 2130131 - DNA, 15 bp, Homo sapiens
ataaaatgaagcatt

SEQ ID NO: 2130132 - DNA, 15 bp, Homo sapiens
taaaatgaagcattt

SEQ ID NO: 2130133 - DNA, 15 bp, Homo sapiens
aaaatgaagcattta

SEQ ID NO: 2130134 - DNA, 15 bp, Homo sapiens
aaatgaagcatttaa

SEQ ID NO: 2130135 - DNA, 15 bp, Homo sapiens
aatgaagcatttaat

SEQ ID NO: 2130136 - DNA, 15 bp, Homo sapiens
atgaagcatttaatt

SEQ ID NO: 2130137 - DNA, 15 bp, Homo sapiens
tgaagcatttaatta

SEQ ID NO: 2130138 - DNA, 15 bp, Homo sapiens
gaagcatttaattat

SEQ ID NO: 2130139 - DNA, 15 bp, Homo sapiens
aagcatttaattata

SEQ ID NO: 2130140 - DNA, 15 bp, Homo sapiens
agcatttaattatag

SEQ ID NO: 2130141 - DNA, 15 bp, Homo sapiens
gcatttaattatagt

SEQ ID NO: 2130142 - DNA, 15 bp, Homo sapiens
catttaattatagta

SEQ ID NO: 2130143 - DNA, 15 bp, Homo sapiens
ttcctgagatgattt

SEQ ID NO: 2130144 - DNA, 15 bp, Homo sapiens
tcctgagatgatttt

SEQ ID NO: 2130145 - DNA, 15 bp, Homo sapiens
cctgagatgatttta

SEQ ID NO: 2130146 - DNA, 15 bp, Homo sapiens
ctgagatgattttat

SEQ ID NO: 2130147 - DNA, 15 bp, Homo sapiens
tgagatgattttatc

SEQ ID NO: 2130148 - DNA, 15 bp, Homo sapiens
gagatgattttatcg

SEQ ID NO: 2130149 - DNA, 15 bp, Homo sapiens
agatgattttatcgt

SEQ ID NO: 2130150 - DNA, 15 bp, Homo sapiens
gatgattttatcgtt

SEQ ID NO: 2130151 - DNA, 15 bp, Homo sapiens
atgattttatcgttg

SEQ ID NO: 2130152 - DNA, 15 bp, Homo sapiens
tgattttatcgttga

SEQ ID NO: 2130153 - DNA, 15 bp, Homo sapiens
gattttatcgttgag

SEQ ID NO: 2130154 - DNA, 15 bp, Homo sapiens
attttatcgttgagg

SEQ ID NO: 2130155 - DNA, 15 bp, Homo sapiens
ttttatcgttgagga

SEQ ID NO: 2130156 - DNA, 15 bp, Homo sapiens
tttatcgttgaggag

SEQ ID NO: 2130157 - DNA, 15 bp, Homo sapiens
ttatcgttgaggagc

SEQ ID NO: 2130158 - DNA, 15 bp, Homo sapiens
tatcgttgaggagct

SEQ ID NO: 2130159 - DNA, 15 bp, Homo sapiens
atcgttgaggagcta

SEQ ID NO: 2130160 - DNA, 15 bp, Homo sapiens
tcgttgaggagctaa

SEQ ID NO: 2130161 - DNA, 15 bp, Homo sapiens
cgttgaggagctaat

SEQ ID NO: 2130162 - DNA, 15 bp, Homo sapiens
gttgaggagctaatg

SEQ ID NO: 2130163 - DNA, 15 bp, Homo sapiens
ttgaggagctaatgt

SEQ ID NO: 2130164 - DNA, 15 bp, Homo sapiens
tgaggagctaatgtg

SEQ ID NO: 2130165 - DNA, 15 bp, Homo sapiens
gaggagctaatgtga

SEQ ID NO: 2130166 - DNA, 15 bp, Homo sapiens
aggagctaatgtgag

SEQ ID NO: 2130167 - DNA, 15 bp, Homo sapiens
ggagctaatgtgagc

SEQ ID NO: 2130168 - DNA, 15 bp, Homo sapiens
gagctaatgtgagca

SEQ ID NO: 2130169 - DNA, 15 bp, Homo sapiens
agctaatgtgagcac

SEQ ID NO: 2130170 - DNA, 15 bp, Homo sapiens
gctaatgtgagcaca

SEQ ID NO: 2130171 - DNA, 15 bp, Homo sapiens
ctaatgtgagcacat

SEQ ID NO: 2130172 - DNA, 15 bp, Homo sapiens
taatgtgagcacatt

SEQ ID NO: 2130173 - DNA, 15 bp, Homo sapiens
aatgtgagcacattt

SEQ ID NO: 2130174 - DNA, 15 bp, Homo sapiens
atgtgagcacatttg

SEQ ID NO: 2130175 - DNA, 15 bp, Homo sapiens
tgtgagcacatttga

SEQ ID NO: 2130176 - DNA, 15 bp, Homo sapiens
gtgagcacatttgaa

SEQ ID NO: 2130177 - DNA, 15 bp, Homo sapiens
tgagcacatttgaaa

SEQ ID NO: 2130178 - DNA, 15 bp, Homo sapiens
gagcacatttgaaat

SEQ ID NO: 2130179 - DNA, 15 bp, Homo sapiens
agcacatttgaaata

SEQ ID NO: 2130180 - DNA, 15 bp, Homo sapiens
gcacatttgaaataa

SEQ ID NO: 2130181 - DNA, 15 bp, Homo sapiens
cacatttgaaataac

SEQ ID NO: 2130182 - DNA, 15 bp, Homo sapiens
acatttgaaataact

SEQ ID NO: 2130183 - DNA, 15 bp, Homo sapiens
catttgaaataactt

SEQ ID NO: 2130184 - DNA, 15 bp, Homo sapiens
atttgaaataacttt

SEQ ID NO: 2130185 - DNA, 15 bp, Homo sapiens
tttgaaataacttta

SEQ ID NO: 2130186 - DNA, 15 bp, Homo sapiens
ttgaaataactttag

SEQ ID NO: 2130187 - DNA, 15 bp, Homo sapiens
tgaaataactttaga

SEQ ID NO: 2130188 - DNA, 15 bp, Homo sapiens
gaaataactttagaa

SEQ ID NO: 2130189 - DNA, 15 bp, Homo sapiens
aaataactttagaaa

SEQ ID NO: 2130190 - DNA, 15 bp, Homo sapiens
aataactttagaaaa

SEQ ID NO: 2130191 - DNA, 15 bp, Homo sapiens
ataactttagaaaat

SEQ ID NO: 2130192 - DNA, 15 bp, Homo sapiens
taactttagaaaata

SEQ ID NO: 2130193 - DNA, 15 bp, Homo sapiens
aactttagaaaataa

SEQ ID NO: 2130194 - DNA, 15 bp, Homo sapiens
actttagaaaataat

SEQ ID NO: 2130195 - DNA, 15 bp, Homo sapiens
ctttagaaaataata

SEQ ID NO: 2130196 - DNA, 15 bp, Homo sapiens
tttagaaaataataa

SEQ ID NO: 2130197 - DNA, 15 bp, Homo sapiens
ttagaaaataataag

SEQ ID NO: 2130198 - DNA, 15 bp, Homo sapiens
tagaaaataataagt

SEQ ID NO: 2130199 - DNA, 15 bp, Homo sapiens
agaaaataataagtg

SEQ ID NO: 2130200 - DNA, 15 bp, Homo sapiens
gaaaataataagtgc

SEQ ID NO: 2130201 - DNA, 15 bp, Homo sapiens
aaaataataagtgct

SEQ ID NO: 2130202 - DNA, 15 bp, Homo sapiens
aaataataagtgctg

SEQ ID NO: 2130203 - DNA, 15 bp, Homo sapiens
aataataagtgctgt

SEQ ID NO: 2130204 - DNA, 15 bp, Homo sapiens
ataataagtgctgtt

SEQ ID NO: 2130205 - DNA, 15 bp, Homo sapiens
taataagtgctgttt

SEQ ID NO: 2130206 - DNA, 15 bp, Homo sapiens
aataagtgctgtttt

SEQ ID NO: 2130207 - DNA, 15 bp, Homo sapiens
ataagtgctgttttg

SEQ ID NO: 2130208 - DNA, 15 bp, Homo sapiens
taagtgctgttttgt

SEQ ID NO: 2130209 - DNA, 15 bp, Homo sapiens
aagtgctgttttgtg

SEQ ID NO: 2130210 - DNA, 15 bp, Homo sapiens
agtgctgttttgtgt

SEQ ID NO: 2130211 - DNA, 15 bp, Homo sapiens
gtgctgttttgtgtg

SEQ ID NO: 2130212 - DNA, 15 bp, Homo sapiens
tgctgttttgtgtga

SEQ ID NO: 2130213 - DNA, 15 bp, Homo sapiens
gctgttttgtgtgaa

SEQ ID NO: 2130214 - DNA, 15 bp, Homo sapiens
ctgttttgtgtgaat

SEQ ID NO: 2130215 - DNA, 15 bp, Homo sapiens
tgttttgtgtgaatc

SEQ ID NO: 2130216 - DNA, 15 bp, Homo sapiens
gttttgtgtgaatca

SEQ ID NO: 2130217 - DNA, 15 bp, Homo sapiens
ttttgtgtgaatcat

SEQ ID NO: 2130218 - DNA, 15 bp, Homo sapiens
tttgtgtgaatcata

SEQ ID NO: 2130219 - DNA, 15 bp, Homo sapiens
ttgtgtgaatcataa

SEQ ID NO: 2130220 - DNA, 15 bp, Homo sapiens
tgtgtgaatcataag

SEQ ID NO: 2130221 - DNA, 15 bp, Homo sapiens
gtgtgaatcataagt

SEQ ID NO: 2130222 - DNA, 15 bp, Homo sapiens
tgtgaatcataagta

SEQ ID NO: 2130223 - DNA, 15 bp, Homo sapiens
gtgaatcataagtag

SEQ ID NO: 2130224 - DNA, 15 bp, Homo sapiens
tgaatcataagtagt

SEQ ID NO: 2130225 - DNA, 15 bp, Homo sapiens
gaatcataagtagta

SEQ ID NO: 2130226 - DNA, 15 bp, Homo sapiens
aatcataagtagtag

SEQ ID NO: 2130227 - DNA, 15 bp, Homo sapiens
atcataagtagtagt

SEQ ID NO: 2130228 - DNA, 15 bp, Homo sapiens
tcataagtagtagtt

SEQ ID NO: 2130229 - DNA, 15 bp, Homo sapiens
cataagtagtagttt

SEQ ID NO: 2130230 - DNA, 15 bp, Homo sapiens
ataagtagtagtttt

SEQ ID NO: 2130231 - DNA, 15 bp, Homo sapiens
taagtagtagtttta

SEQ ID NO: 2130232 - DNA, 15 bp, Homo sapiens
aagtagtagttttag

SEQ ID NO: 2130233 - DNA, 15 bp, Homo sapiens
agtagtagttttagg

SEQ ID NO: 2130234 - DNA, 15 bp, Homo sapiens
gtagtagttttagga

SEQ ID NO: 2130235 - DNA, 15 bp, Homo sapiens
tagtagttttaggaa

SEQ ID NO: 2130236 - DNA, 15 bp, Homo sapiens
agtagttttaggaag

SEQ ID NO: 2130237 - DNA, 15 bp, Homo sapiens
gtagttttaggaagg

SEQ ID NO: 2130238 - DNA, 15 bp, Homo sapiens
tagttttaggaaggg

SEQ ID NO: 2130239 - DNA, 15 bp, Homo sapiens
agttttaggaaggga

SEQ ID NO: 2130240 - DNA, 15 bp, Homo sapiens
gttttaggaagggaa

SEQ ID NO: 2130241 - DNA, 15 bp, Homo sapiens
ttttaggaagggaac

SEQ ID NO: 2130242 - DNA, 15 bp, Homo sapiens
tttaggaagggaacc

SEQ ID NO: 2130243 - DNA, 15 bp, Homo sapiens
ttaggaagggaaccc

SEQ ID NO: 2130244 - DNA, 15 bp, Homo sapiens
taggaagggaaccca

SEQ ID NO: 2130245 - DNA, 15 bp, Homo sapiens
aggaagggaacccac

SEQ ID NO: 2130246 - DNA, 15 bp, Homo sapiens
ggaagggaacccaca

SEQ ID NO: 2130247 - DNA, 15 bp, Homo sapiens
gaagggaacccacaa

SEQ ID NO: 2130248 - DNA, 15 bp, Homo sapiens
aagggaacccacaag

SEQ ID NO: 2130249 - DNA, 15 bp, Homo sapiens
agggaacccacaagg

SEQ ID NO: 2130250 - DNA, 15 bp, Homo sapiens
gggaacccacaagga

SEQ ID NO: 2130251 - DNA, 15 bp, Homo sapiens
ggaacccacaaggat

SEQ ID NO: 2130252 - DNA, 15 bp, Homo sapiens
gaacccacaaggatt

SEQ ID NO: 2130253 - DNA, 15 bp, Homo sapiens
aacccacaaggattt

SEQ ID NO: 2130254 - DNA, 15 bp, Homo sapiens
acccacaaggatttg

SEQ ID NO: 2130255 - DNA, 15 bp, Homo sapiens
cccacaaggatttga

SEQ ID NO: 2130256 - DNA, 15 bp, Homo sapiens
ccacaaggatttgaa

SEQ ID NO: 2130257 - DNA, 15 bp, Homo sapiens
cacaaggatttgaag

SEQ ID NO: 2130258 - DNA, 15 bp, Homo sapiens
acaaggatttgaagt

SEQ ID NO: 2130259 - DNA, 15 bp, Homo sapiens
caaggatttgaagtt

SEQ ID NO: 2130260 - DNA, 15 bp, Homo sapiens
aaggatttgaagttg

SEQ ID NO: 2130261 - DNA, 15 bp, Homo sapiens
aggatttgaagttga

SEQ ID NO: 2130262 - DNA, 15 bp, Homo sapiens
ggatttgaagttgat

SEQ ID NO: 2130263 - DNA, 15 bp, Homo sapiens
gatttgaagttgata

SEQ ID NO: 2130264 - DNA, 15 bp, Homo sapiens
atttgaagttgatag

SEQ ID NO: 2130265 - DNA, 15 bp, Homo sapiens
tttgaagttgataga

SEQ ID NO: 2130266 - DNA, 15 bp, Homo sapiens
ttgaagttgatagaa

SEQ ID NO: 2130267 - DNA, 15 bp, Homo sapiens
tgaagttgatagaat

SEQ ID NO: 2130268 - DNA, 15 bp, Homo sapiens
gaagttgatagaata

SEQ ID NO: 2130269 - DNA, 15 bp, Homo sapiens
aagttgatagaataa

SEQ ID NO: 2130270 - DNA, 15 bp, Homo sapiens
agttgatagaataaa

SEQ ID NO: 2130271 - DNA, 15 bp, Homo sapiens
gttgatagaataaac

SEQ ID NO: 2130272 - DNA, 15 bp, Homo sapiens
ttgatagaataaact

SEQ ID NO: 2130273 - DNA, 15 bp, Homo sapiens
tgatagaataaactt

SEQ ID NO: 2130274 - DNA, 15 bp, Homo sapiens
gatagaataaactta

SEQ ID NO: 2130275 - DNA, 15 bp, Homo sapiens
atagaataaacttaa

SEQ ID NO: 2130276 - DNA, 15 bp, Homo sapiens
tagaataaacttaag

SEQ ID NO: 2130277 - DNA, 15 bp, Homo sapiens
agaataaacttaagg

SEQ ID NO: 2130278 - DNA, 15 bp, Homo sapiens
gaataaacttaagga

SEQ ID NO: 2130279 - DNA, 15 bp, Homo sapiens
aataaacttaaggaa

SEQ ID NO: 2130280 - DNA, 15 bp, Homo sapiens
ataaacttaaggaag

SEQ ID NO: 2130281 - DNA, 15 bp, Homo sapiens
taaacttaaggaagt

SEQ ID NO: 2130282 - DNA, 15 bp, Homo sapiens
aaacttaaggaagtg

SEQ ID NO: 2130283 - DNA, 15 bp, Homo sapiens
aacttaaggaagtgg

SEQ ID NO: 2130284 - DNA, 15 bp, Homo sapiens
acttaaggaagtggg

SEQ ID NO: 2130285 - DNA, 15 bp, Homo sapiens
cttaaggaagtgggt

SEQ ID NO: 2130286 - DNA, 15 bp, Homo sapiens
ttaaggaagtgggtt

SEQ ID NO: 2130287 - DNA, 15 bp, Homo sapiens
taaggaagtgggttt

SEQ ID NO: 2130288 - DNA, 15 bp, Homo sapiens
aaggaagtgggtttg

SEQ ID NO: 2130289 - DNA, 15 bp, Homo sapiens
aggaagtgggtttgc

SEQ ID NO: 2130290 - DNA, 15 bp, Homo sapiens
ggaagtgggtttgct

SEQ ID NO: 2130291 - DNA, 15 bp, Homo sapiens
gaagtgggtttgctt

SEQ ID NO: 2130292 - DNA, 15 bp, Homo sapiens
aagtgggtttgcttt

SEQ ID NO: 2130293 - DNA, 15 bp, Homo sapiens
agtgggtttgctttt

SEQ ID NO: 2130294 - DNA, 15 bp, Homo sapiens
gtgggtttgcttttt

SEQ ID NO: 2130295 - DNA, 15 bp, Homo sapiens
tgggtttgctttttc

SEQ ID NO: 2130296 - DNA, 15 bp, Homo sapiens
gggtttgctttttct

SEQ ID NO: 2130297 - DNA, 15 bp, Homo sapiens
ggtttgctttttctc

SEQ ID NO: 2130298 - DNA, 15 bp, Homo sapiens
gtttgctttttctct

SEQ ID NO: 2130299 - DNA, 15 bp, Homo sapiens
tttgctttttctctt

SEQ ID NO: 2130300 - DNA, 15 bp, Homo sapiens
ttgctttttctcttt

SEQ ID NO: 2130301 - DNA, 15 bp, Homo sapiens
tgctttttctcttta

SEQ ID NO: 2130302 - DNA, 15 bp, Homo sapiens
gctttttctctttaa

SEQ ID NO: 2130303 - DNA, 15 bp, Homo sapiens
ctttttctctttaag

SEQ ID NO: 2130304 - DNA, 15 bp, Homo sapiens
tttttctctttaagc

SEQ ID NO: 2130305 - DNA, 15 bp, Homo sapiens
ttttctctttaagcc

SEQ ID NO: 2130306 - DNA, 15 bp, Homo sapiens
tttctctttaagcca

SEQ ID NO: 2130307 - DNA, 15 bp, Homo sapiens
ttctctttaagccaa

SEQ ID NO: 2130308 - DNA, 15 bp, Homo sapiens
tctctttaagccaag

SEQ ID NO: 2130309 - DNA, 15 bp, Homo sapiens
ctctttaagccaaga

SEQ ID NO: 2130310 - DNA, 15 bp, Homo sapiens
tctttaagccaagat

SEQ ID NO: 2130311 - DNA, 15 bp, Homo sapiens
ctttaagccaagata

SEQ ID NO: 2130312 - DNA, 15 bp, Homo sapiens
tttaagccaagatag

SEQ ID NO: 2130313 - DNA, 15 bp, Homo sapiens
ttaagccaagatagg

SEQ ID NO: 2130314 - DNA, 15 bp, Homo sapiens
taagccaagatagga

SEQ ID NO: 2130315 - DNA, 15 bp, Homo sapiens
aagccaagataggat

SEQ ID NO: 2130316 - DNA, 15 bp, Homo sapiens
agccaagataggatt

SEQ ID NO: 2130317 - DNA, 15 bp, Homo sapiens
gccaagataggatta

SEQ ID NO: 2130318 - DNA, 15 bp, Homo sapiens
ccaagataggattaa

SEQ ID NO: 2130319 - DNA, 15 bp, Homo sapiens
caagataggattaat

SEQ ID NO: 2130320 - DNA, 15 bp, Homo sapiens
aagataggattaata

SEQ ID NO: 2130321 - DNA, 15 bp, Homo sapiens
agataggattaatat

SEQ ID NO: 2130322 - DNA, 15 bp, Homo sapiens
gataggattaatatt

SEQ ID NO: 2130323 - DNA, 15 bp, Homo sapiens
ataggattaatattg

SEQ ID NO: 2130324 - DNA, 15 bp, Homo sapiens
taggattaatattgc

SEQ ID NO: 2130325 - DNA, 15 bp, Homo sapiens
aggattaatattgca

SEQ ID NO: 2130326 - DNA, 15 bp, Homo sapiens
ggattaatattgcag

SEQ ID NO: 2130327 - DNA, 15 bp, Homo sapiens
gattaatattgcagc

SEQ ID NO: 2130328 - DNA, 15 bp, Homo sapiens
attaatattgcagcc

SEQ ID NO: 2130329 - DNA, 15 bp, Homo sapiens
ttaatattgcagcca

SEQ ID NO: 2130330 - DNA, 15 bp, Homo sapiens
taatattgcagccat

SEQ ID NO: 2130331 - DNA, 15 bp, Homo sapiens
aatattgcagccatc

SEQ ID NO: 2130332 - DNA, 15 bp, Homo sapiens
atattgcagccatct

SEQ ID NO: 2130333 - DNA, 15 bp, Homo sapiens
tattgcagccatctg

SEQ ID NO: 2130334 - DNA, 15 bp, Homo sapiens
attgcagccatctgg

SEQ ID NO: 2130335 - DNA, 15 bp, Homo sapiens
ttgcagccatctgga

SEQ ID NO: 2130336 - DNA, 15 bp, Homo sapiens
tgcagccatctggat

SEQ ID NO: 2130337 - DNA, 15 bp, Homo sapiens
gcagccatctggata

SEQ ID NO: 2130338 - DNA, 15 bp, Homo sapiens
cagccatctggatag

SEQ ID NO: 2130339 - DNA, 15 bp, Homo sapiens
agccatctggatagt

SEQ ID NO: 2130340 - DNA, 15 bp, Homo sapiens
gccatctggatagtc

SEQ ID NO: 2130341 - DNA, 15 bp, Homo sapiens
ccatctggatagtcc

SEQ ID NO: 2130342 - DNA, 15 bp, Homo sapiens
catctggatagtcca

SEQ ID NO: 2130343 - DNA, 15 bp, Homo sapiens
atctggatagtccag

SEQ ID NO: 2130344 - DNA, 15 bp, Homo sapiens
tctggatagtccagt

SEQ ID NO: 2130345 - DNA, 15 bp, Homo sapiens
ctggatagtccagtt

SEQ ID NO: 2130346 - DNA, 15 bp, Homo sapiens
tggatagtccagttg

SEQ ID NO: 2130347 - DNA, 15 bp, Homo sapiens
ggatagtccagttgg

SEQ ID NO: 2130348 - DNA, 15 bp, Homo sapiens
gatagtccagttggt

SEQ ID NO: 2130349 - DNA, 15 bp, Homo sapiens
atagtccagttggtt

SEQ ID NO: 2130350 - DNA, 15 bp, Homo sapiens
tagtccagttggttt

SEQ ID NO: 2130351 - DNA, 15 bp, Homo sapiens
agtccagttggttta

SEQ ID NO: 2130352 - DNA, 15 bp, Homo sapiens
gtccagttggtttat

SEQ ID NO: 2130353 - DNA, 15 bp, Homo sapiens
tccagttggtttatt

SEQ ID NO: 2130354 - DNA, 15 bp, Homo sapiens
ccagttggtttattt

SEQ ID NO: 2130355 - DNA, 15 bp, Homo sapiens
cagttggtttatttt

SEQ ID NO: 2130356 - DNA, 15 bp, Homo sapiens
agttggtttatttta

SEQ ID NO: 2130357 - DNA, 15 bp, Homo sapiens
gttggtttattttaa

SEQ ID NO: 2130358 - DNA, 15 bp, Homo sapiens
ttggtttattttaat

SEQ ID NO: 2130359 - DNA, 15 bp, Homo sapiens
tggtttattttaatt

SEQ ID NO: 2130360 - DNA, 15 bp, Homo sapiens
ggtttattttaattt

SEQ ID NO: 2130361 - DNA, 15 bp, Homo sapiens
gtttattttaatttc

SEQ ID NO: 2130362 - DNA, 15 bp, Homo sapiens
tttattttaatttca

SEQ ID NO: 2130363 - DNA, 15 bp, Homo sapiens
ttattttaatttcat

SEQ ID NO: 2130364 - DNA, 15 bp, Homo sapiens
tattttaatttcatt

SEQ ID NO: 2130365 - DNA, 15 bp, Homo sapiens
attttaatttcattt

SEQ ID NO: 2130366 - DNA, 15 bp, Homo sapiens
ttttaatttcatttg

SEQ ID NO: 2130367 - DNA, 15 bp, Homo sapiens
tttaatttcatttgt

SEQ ID NO: 2130368 - DNA, 15 bp, Homo sapiens
ttaatttcatttgtt

SEQ ID NO: 2130369 - DNA, 15 bp, Homo sapiens
taatttcatttgttt

SEQ ID NO: 2130370 - DNA, 15 bp, Homo sapiens
aatttcatttgtttt

SEQ ID NO: 2130371 - DNA, 15 bp, Homo sapiens
atttcatttgttttt

SEQ ID NO: 2130372 - DNA, 15 bp, Homo sapiens
tttcatttgtttttt

SEQ ID NO: 2130373 - DNA, 15 bp, Homo sapiens
ttcatttgtttttta

SEQ ID NO: 2130374 - DNA, 15 bp, Homo sapiens
tcatttgttttttac

SEQ ID NO: 2130375 - DNA, 15 bp, Homo sapiens
catttgttttttacc

SEQ ID NO: 2130376 - DNA, 15 bp, Homo sapiens
atttgttttttacct

SEQ ID NO: 2130377 - DNA, 15 bp, Homo sapiens
tttgttttttacctc

SEQ ID NO: 2130378 - DNA, 15 bp, Homo sapiens
ttgttttttacctct

SEQ ID NO: 2130379 - DNA, 15 bp, Homo sapiens
tgttttttacctctt

SEQ ID NO: 2130380 - DNA, 15 bp, Homo sapiens
gttttttacctcttt

SEQ ID NO: 2130381 - DNA, 15 bp, Homo sapiens
ttttttacctctttt

SEQ ID NO: 2130382 - DNA, 15 bp, Homo sapiens
tttttacctcttttg

SEQ ID NO: 2130383 - DNA, 15 bp, Homo sapiens
ttttacctcttttgg

SEQ ID NO: 2130384 - DNA, 15 bp, Homo sapiens
tttacctcttttgga

SEQ ID NO: 2130385 - DNA, 15 bp, Homo sapiens
ttacctcttttggag

SEQ ID NO: 2130386 - DNA, 15 bp, Homo sapiens
tacctcttttggagc

SEQ ID NO: 2130387 - DNA, 15 bp, Homo sapiens
acctcttttggagcc

SEQ ID NO: 2130388 - DNA, 15 bp, Homo sapiens
cctcttttggagcca

SEQ ID NO: 2130389 - DNA, 15 bp, Homo sapiens
ctcttttggagccat

SEQ ID NO: 2130390 - DNA, 15 bp, Homo sapiens
tcttttggagccatg

SEQ ID NO: 2130391 - DNA, 15 bp, Homo sapiens
cttttggagccatgg

SEQ ID NO: 2130392 - DNA, 15 bp, Homo sapiens
ttttggagccatgga

SEQ ID NO: 2130393 - DNA, 15 bp, Homo sapiens
tttggagccatggaa

SEQ ID NO: 2130394 - DNA, 15 bp, Homo sapiens
ttggagccatggaaa

SEQ ID NO: 2130395 - DNA, 15 bp, Homo sapiens
tggagccatggaaag

SEQ ID NO: 2130396 - DNA, 15 bp, Homo sapiens
ggagccatggaaaga

SEQ ID NO: 2130397 - DNA, 15 bp, Homo sapiens
gagccatggaaagag

SEQ ID NO: 2130398 - DNA, 15 bp, Homo sapiens
agccatggaaagaga

SEQ ID NO: 2130399 - DNA, 15 bp, Homo sapiens
gccatggaaagagat

SEQ ID NO: 2130400 - DNA, 15 bp, Homo sapiens
ccatggaaagagatg

SEQ ID NO: 2130401 - DNA, 15 bp, Homo sapiens
catggaaagagatga

SEQ ID NO: 2130402 - DNA, 15 bp, Homo sapiens
atggaaagagatgaa

SEQ ID NO: 2130403 - DNA, 15 bp, Homo sapiens
tggaaagagatgaaa

SEQ ID NO: 2130404 - DNA, 15 bp, Homo sapiens
ggaaagagatgaaag

SEQ ID NO: 2130405 - DNA, 15 bp, Homo sapiens
gaaagagatgaaagg

SEQ ID NO: 2130406 - DNA, 15 bp, Homo sapiens
aaagagatgaaaggg

SEQ ID NO: 2130407 - DNA, 15 bp, Homo sapiens
aagagatgaaaggga

SEQ ID NO: 2130408 - DNA, 15 bp, Homo sapiens
agagatgaaagggat

SEQ ID NO: 2130409 - DNA, 15 bp, Homo sapiens
gagatgaaagggata

SEQ ID NO: 2130410 - DNA, 15 bp, Homo sapiens
agatgaaagggatag

SEQ ID NO: 2130411 - DNA, 15 bp, Homo sapiens
gatgaaagggataga

SEQ ID NO: 2130412 - DNA, 15 bp, Homo sapiens
atgaaagggatagag

SEQ ID NO: 2130413 - DNA, 15 bp, Homo sapiens
tgaaagggatagagc

SEQ ID NO: 2130414 - DNA, 15 bp, Homo sapiens
gaaagggatagagca

SEQ ID NO: 2130415 - DNA, 15 bp, Homo sapiens
aaagggatagagcat

SEQ ID NO: 2130416 - DNA, 15 bp, Homo sapiens
aagggatagagcata

SEQ ID NO: 2130417 - DNA, 15 bp, Homo sapiens
agggatagagcatag

SEQ ID NO: 2130418 - DNA, 15 bp, Homo sapiens
gggatagagcatagc

SEQ ID NO: 2130419 - DNA, 15 bp, Homo sapiens
ggatagagcatagcc

SEQ ID NO: 2130420 - DNA, 15 bp, Homo sapiens
gatagagcatagcca

SEQ ID NO: 2130421 - DNA, 15 bp, Homo sapiens
atagagcatagccat

SEQ ID NO: 2130422 - DNA, 15 bp, Homo sapiens
tagagcatagccatt

SEQ ID NO: 2130423 - DNA, 15 bp, Homo sapiens
agagcatagccattg

SEQ ID NO: 2130424 - DNA, 15 bp, Homo sapiens
gagcatagccattgt

SEQ ID NO: 2130425 - DNA, 15 bp, Homo sapiens
agcatagccattgtg

SEQ ID NO: 2130426 - DNA, 15 bp, Homo sapiens
gcatagccattgtgt

SEQ ID NO: 2130427 - DNA, 15 bp, Homo sapiens
catagccattgtgtt

SEQ ID NO: 2130428 - DNA, 15 bp, Homo sapiens
atagccattgtgttt

SEQ ID NO: 2130429 - DNA, 15 bp, Homo sapiens
tagccattgtgtttg

SEQ ID NO: 2130430 - DNA, 15 bp, Homo sapiens
agccattgtgtttgg

SEQ ID NO: 2130431 - DNA, 15 bp, Homo sapiens
gccattgtgtttggc

SEQ ID NO: 2130432 - DNA, 15 bp, Homo sapiens
ccattgtgtttggct

SEQ ID NO: 2130433 - DNA, 15 bp, Homo sapiens
cattgtgtttggcta

SEQ ID NO: 2130434 - DNA, 15 bp, Homo sapiens
attgtgtttggctat

SEQ ID NO: 2130435 - DNA, 15 bp, Homo sapiens
ttgtgtttggctatt

SEQ ID NO: 2130436 - DNA, 15 bp, Homo sapiens
tgtgtttggctattt

SEQ ID NO: 2130437 - DNA, 15 bp, Homo sapiens
gtgtttggctatttg

SEQ ID NO: 2130438 - DNA, 15 bp, Homo sapiens
tgtttggctatttgc

SEQ ID NO: 2130439 - DNA, 15 bp, Homo sapiens
gtttggctatttgcg

SEQ ID NO: 2130440 - DNA, 15 bp, Homo sapiens
tttggctatttgcga

SEQ ID NO: 2130441 - DNA, 15 bp, Homo sapiens
ttggctatttgcgaa

SEQ ID NO: 2130442 - DNA, 15 bp, Homo sapiens
tggctatttgcgaag

SEQ ID NO: 2130443 - DNA, 15 bp, Homo sapiens
ggctatttgcgaagg

SEQ ID NO: 2130444 - DNA, 15 bp, Homo sapiens
gctatttgcgaaggt

SEQ ID NO: 2130445 - DNA, 15 bp, Homo sapiens
ctatttgcgaaggtt

SEQ ID NO: 2130446 - DNA, 15 bp, Homo sapiens
tatttgcgaaggttg

SEQ ID NO: 2130447 - DNA, 15 bp, Homo sapiens
atttgcgaaggttgg

SEQ ID NO: 2130448 - DNA, 15 bp, Homo sapiens
tttgcgaaggttggc

SEQ ID NO: 2130449 - DNA, 15 bp, Homo sapiens
ttgcgaaggttggca

SEQ ID NO: 2130450 - DNA, 15 bp, Homo sapiens
tgcgaaggttggcaa

SEQ ID NO: 2130451 - DNA, 15 bp, Homo sapiens
gcgaaggttggcaaa

SEQ ID NO: 2130452 - DNA, 15 bp, Homo sapiens
cgaaggttggcaaat

SEQ ID NO: 2130453 - DNA, 15 bp, Homo sapiens
gaaggttggcaaatt

SEQ ID NO: 2130454 - DNA, 15 bp, Homo sapiens
aaggttggcaaatta

SEQ ID NO: 2130455 - DNA, 15 bp, Homo sapiens
aggttggcaaattag

SEQ ID NO: 2130456 - DNA, 15 bp, Homo sapiens
ggttggcaaattagt

SEQ ID NO: 2130457 - DNA, 15 bp, Homo sapiens
gttggcaaattagtg

SEQ ID NO: 2130458 - DNA, 15 bp, Homo sapiens
ttggcaaattagtga

SEQ ID NO: 2130459 - DNA, 15 bp, Homo sapiens
tggcaaattagtgat

SEQ ID NO: 2130460 - DNA, 15 bp, Homo sapiens
ggcaaattagtgatt

SEQ ID NO: 2130461 - DNA, 15 bp, Homo sapiens
gcaaattagtgattg

SEQ ID NO: 2130462 - DNA, 15 bp, Homo sapiens
caaattagtgattgc

SEQ ID NO: 2130463 - DNA, 15 bp, Homo sapiens
aaattagtgattgct

SEQ ID NO: 2130464 - DNA, 15 bp, Homo sapiens
aattagtgattgcta

SEQ ID NO: 2130465 - DNA, 15 bp, Homo sapiens
attagtgattgctaa

SEQ ID NO: 2130466 - DNA, 15 bp, Homo sapiens
ttagtgattgctaaa

SEQ ID NO: 2130467 - DNA, 15 bp, Homo sapiens
tagtgattgctaaat

SEQ ID NO: 2130468 - DNA, 15 bp, Homo sapiens
agtgattgctaaatc

SEQ ID NO: 2130469 - DNA, 15 bp, Homo sapiens
gtgattgctaaatct

SEQ ID NO: 2130470 - DNA, 15 bp, Homo sapiens
tgattgctaaatctc

SEQ ID NO: 2130471 - DNA, 15 bp, Homo sapiens
gattgctaaatctca

SEQ ID NO: 2130472 - DNA, 15 bp, Homo sapiens
attgctaaatctcat

SEQ ID NO: 2130473 - DNA, 15 bp, Homo sapiens
ttgctaaatctcata

SEQ ID NO: 2130474 - DNA, 15 bp, Homo sapiens
tgctaaatctcataa

SEQ ID NO: 2130475 - DNA, 15 bp, Homo sapiens
gctaaatctcataag

SEQ ID NO: 2130476 - DNA, 15 bp, Homo sapiens
ctaaatctcataagc

SEQ ID NO: 2130477 - DNA, 15 bp, Homo sapiens
taaatctcataagct

SEQ ID NO: 2130478 - DNA, 15 bp, Homo sapiens
aaatctcataagctt

SEQ ID NO: 2130479 - DNA, 15 bp, Homo sapiens
aatctcataagcttg

SEQ ID NO: 2130480 - DNA, 15 bp, Homo sapiens
atctcataagcttga

SEQ ID NO: 2130481 - DNA, 15 bp, Homo sapiens
tctcataagcttgag

SEQ ID NO: 2130482 - DNA, 15 bp, Homo sapiens
ctcataagcttgagt

SEQ ID NO: 2130483 - DNA, 15 bp, Homo sapiens
tcataagcttgagta

SEQ ID NO: 2130484 - DNA, 15 bp, Homo sapiens
cataagcttgagtat

SEQ ID NO: 2130485 - DNA, 15 bp, Homo sapiens
ataagcttgagtatt

SEQ ID NO: 2130486 - DNA, 15 bp, Homo sapiens
taagcttgagtattt

SEQ ID NO: 2130487 - DNA, 15 bp, Homo sapiens
aagcttgagtatttt

SEQ ID NO: 2130488 - DNA, 15 bp, Homo sapiens
agcttgagtatttta

SEQ ID NO: 2130489 - DNA, 15 bp, Homo sapiens
gcttgagtattttaa

SEQ ID NO: 2130490 - DNA, 15 bp, Homo sapiens
cttgagtattttaaa

SEQ ID NO: 2130491 - DNA, 15 bp, Homo sapiens
ttgagtattttaaag

SEQ ID NO: 2130492 - DNA, 15 bp, Homo sapiens
tgagtattttaaagt

SEQ ID NO: 2130493 - DNA, 15 bp, Homo sapiens
gagtattttaaagtt

SEQ ID NO: 2130494 - DNA, 15 bp, Homo sapiens
agtattttaaagttc

SEQ ID NO: 2130495 - DNA, 15 bp, Homo sapiens
gtattttaaagttca

SEQ ID NO: 2130496 - DNA, 15 bp, Homo sapiens
tattttaaagttcag

SEQ ID NO: 2130497 - DNA, 15 bp, Homo sapiens
attttaaagttcaga

SEQ ID NO: 2130498 - DNA, 15 bp, Homo sapiens
ttttaaagttcagag

SEQ ID NO: 2130499 - DNA, 15 bp, Homo sapiens
tttaaagttcagaga

SEQ ID NO: 2130500 - DNA, 15 bp, Homo sapiens
ttaaagttcagagat

SEQ ID NO: 2130501 - DNA, 15 bp, Homo sapiens
taaagttcagagatt

SEQ ID NO: 2130502 - DNA, 15 bp, Homo sapiens
aaagttcagagattg

SEQ ID NO: 2130503 - DNA, 15 bp, Homo sapiens
aagttcagagattga

SEQ ID NO: 2130504 - DNA, 15 bp, Homo sapiens
agttcagagattgag

SEQ ID NO: 2130505 - DNA, 15 bp, Homo sapiens
gttcagagattgagg

SEQ ID NO: 2130506 - DNA, 15 bp, Homo sapiens
ttcagagattgaggg

SEQ ID NO: 2130507 - DNA, 15 bp, Homo sapiens
tcagagattgagggc

SEQ ID NO: 2130508 - DNA, 15 bp, Homo sapiens
cagagattgagggca

SEQ ID NO: 2130509 - DNA, 15 bp, Homo sapiens
agagattgagggcat

SEQ ID NO: 2130510 - DNA, 15 bp, Homo sapiens
gagattgagggcata

SEQ ID NO: 2130511 - DNA, 15 bp, Homo sapiens
agattgagggcataa

SEQ ID NO: 2130512 - DNA, 15 bp, Homo sapiens
gattgagggcataaa

SEQ ID NO: 2130513 - DNA, 15 bp, Homo sapiens
attgagggcataaat

SEQ ID NO: 2130514 - DNA, 15 bp, Homo sapiens
ttgagggcataaatc

SEQ ID NO: 2130515 - DNA, 15 bp, Homo sapiens
tgagggcataaatct

SEQ ID NO: 2130516 - DNA, 15 bp, Homo sapiens
gagggcataaatcta

SEQ ID NO: 2130517 - DNA, 15 bp, Homo sapiens
agggcataaatctaa

SEQ ID NO: 2130518 - DNA, 15 bp, Homo sapiens
gggcataaatctaat

SEQ ID NO: 2130519 - DNA, 15 bp, Homo sapiens
ggcataaatctaata

SEQ ID NO: 2130520 - DNA, 15 bp, Homo sapiens
gcataaatctaatac

SEQ ID NO: 2130521 - DNA, 15 bp, Homo sapiens
cataaatctaatact

SEQ ID NO: 2130522 - DNA, 15 bp, Homo sapiens
ataaatctaatactt

SEQ ID NO: 2130523 - DNA, 15 bp, Homo sapiens
taaatctaatacttc

SEQ ID NO: 2130524 - DNA, 15 bp, Homo sapiens
aaatctaatacttcg

SEQ ID NO: 2130525 - DNA, 15 bp, Homo sapiens
aatctaatacttcgg

SEQ ID NO: 2130526 - DNA, 15 bp, Homo sapiens
atctaatacttcggc

SEQ ID NO: 2130527 - DNA, 15 bp, Homo sapiens
tctaatacttcggct

SEQ ID NO: 2130528 - DNA, 15 bp, Homo sapiens
ctaatacttcggctc

SEQ ID NO: 2130529 - DNA, 15 bp, Homo sapiens
taatacttcggctcc

SEQ ID NO: 2130530 - DNA, 15 bp, Homo sapiens
aatacttcggctcct

SEQ ID NO: 2130531 - DNA, 15 bp, Homo sapiens
atacttcggctcctt

SEQ ID NO: 2130532 - DNA, 15 bp, Homo sapiens
tacttcggctccttc

SEQ ID NO: 2130533 - DNA, 15 bp, Homo sapiens
acttcggctccttcc

SEQ ID NO: 2130534 - DNA, 15 bp, Homo sapiens
cttcggctccttcca

SEQ ID NO: 2130535 - DNA, 15 bp, Homo sapiens
ttcggctccttccac

SEQ ID NO: 2130536 - DNA, 15 bp, Homo sapiens
tcggctccttccaca

SEQ ID NO: 2130537 - DNA, 15 bp, Homo sapiens
cggctccttccacaa

SEQ ID NO: 2130538 - DNA, 15 bp, Homo sapiens
ggctccttccacaat

SEQ ID NO: 2130539 - DNA, 15 bp, Homo sapiens
gctccttccacaatt

SEQ ID NO: 2130540 - DNA, 15 bp, Homo sapiens
ctccttccacaattt

SEQ ID NO: 2130541 - DNA, 15 bp, Homo sapiens
tccttccacaatttt

SEQ ID NO: 2130542 - DNA, 15 bp, Homo sapiens
ccttccacaatttta

SEQ ID NO: 2130543 - DNA, 15 bp, Homo sapiens
cttccacaattttac

SEQ ID NO: 2130544 - DNA, 15 bp, Homo sapiens
ttccacaattttact

SEQ ID NO: 2130545 - DNA, 15 bp, Homo sapiens
tccacaattttacta

SEQ ID NO: 2130546 - DNA, 15 bp, Homo sapiens
ccacaattttactac

SEQ ID NO: 2130547 - DNA, 15 bp, Homo sapiens
cacaattttactaca

SEQ ID NO: 2130548 - DNA, 15 bp, Homo sapiens
acaattttactacat

SEQ ID NO: 2130549 - DNA, 15 bp, Homo sapiens
caattttactacatt

SEQ ID NO: 2130550 - DNA, 15 bp, Homo sapiens
aattttactacattt

SEQ ID NO: 2130551 - DNA, 15 bp, Homo sapiens
attttactacatttc

SEQ ID NO: 2130552 - DNA, 15 bp, Homo sapiens
ttttactacatttct

SEQ ID NO: 2130553 - DNA, 15 bp, Homo sapiens
tttactacatttctg

SEQ ID NO: 2130554 - DNA, 15 bp, Homo sapiens
ttactacatttctgc

SEQ ID NO: 2130555 - DNA, 15 bp, Homo sapiens
tactacatttctgcc

SEQ ID NO: 2130556 - DNA, 15 bp, Homo sapiens
actacatttctgccc

SEQ ID NO: 2130557 - DNA, 15 bp, Homo sapiens
ctacatttctgccca

SEQ ID NO: 2130558 - DNA, 15 bp, Homo sapiens
tacatttctgcccaa

SEQ ID NO: 2130559 - DNA, 15 bp, Homo sapiens
acatttctgcccaag

SEQ ID NO: 2130560 - DNA, 15 bp, Homo sapiens
catttctgcccaaga

SEQ ID NO: 2130561 - DNA, 15 bp, Homo sapiens
atttctgcccaagaa

SEQ ID NO: 2130562 - DNA, 15 bp, Homo sapiens
tttctgcccaagaac

SEQ ID NO: 2130563 - DNA, 15 bp, Homo sapiens
ttctgcccaagaaca

SEQ ID NO: 2130564 - DNA, 15 bp, Homo sapiens
tctgcccaagaacag

SEQ ID NO: 2130565 - DNA, 15 bp, Homo sapiens
ctgcccaagaacaga

SEQ ID NO: 2130566 - DNA, 15 bp, Homo sapiens
tgcccaagaacagat

SEQ ID NO: 2130567 - DNA, 15 bp, Homo sapiens
gcccaagaacagatg

SEQ ID NO: 2130568 - DNA, 15 bp, Homo sapiens
cccaagaacagatga

SEQ ID NO: 2130569 - DNA, 15 bp, Homo sapiens
ccaagaacagatgac

SEQ ID NO: 2130570 - DNA, 15 bp, Homo sapiens
caagaacagatgacc

SEQ ID NO: 2130571 - DNA, 15 bp, Homo sapiens
aagaacagatgacca

SEQ ID NO: 2130572 - DNA, 15 bp, Homo sapiens
agaacagatgaccat

SEQ ID NO: 2130573 - DNA, 15 bp, Homo sapiens
gaacagatgaccatg

SEQ ID NO: 2130574 - DNA, 15 bp, Homo sapiens
aacagatgaccatgg

SEQ ID NO: 2130575 - DNA, 15 bp, Homo sapiens
acagatgaccatgga

SEQ ID NO: 2130576 - DNA, 15 bp, Homo sapiens
cagatgaccatggat

SEQ ID NO: 2130577 - DNA, 15 bp, Homo sapiens
agatgaccatggata

SEQ ID NO: 2130578 - DNA, 15 bp, Homo sapiens
gatgaccatggataa

SEQ ID NO: 2130579 - DNA, 15 bp, Homo sapiens
atgaccatggataat

SEQ ID NO: 2130580 - DNA, 15 bp, Homo sapiens
tgaccatggataatg

SEQ ID NO: 2130581 - DNA, 15 bp, Homo sapiens
gaccatggataatgc

SEQ ID NO: 2130582 - DNA, 15 bp, Homo sapiens
accatggataatgca

SEQ ID NO: 2130583 - DNA, 15 bp, Homo sapiens
ccatggataatgcat

SEQ ID NO: 2130584 - DNA, 15 bp, Homo sapiens
catggataatgcata

SEQ ID NO: 2130585 - DNA, 15 bp, Homo sapiens
atggataatgcatat

SEQ ID NO: 2130586 - DNA, 15 bp, Homo sapiens
tggataatgcatatc

SEQ ID NO: 2130587 - DNA, 15 bp, Homo sapiens
ggataatgcatatcg

SEQ ID NO: 2130588 - DNA, 15 bp, Homo sapiens
gataatgcatatcgt

SEQ ID NO: 2130589 - DNA, 15 bp, Homo sapiens
ataatgcatatcgta

SEQ ID NO: 2130590 - DNA, 15 bp, Homo sapiens
taatgcatatcgtag

SEQ ID NO: 2130591 - DNA, 15 bp, Homo sapiens
aatgcatatcgtaga

SEQ ID NO: 2130592 - DNA, 15 bp, Homo sapiens
atgcatatcgtagat

SEQ ID NO: 2130593 - DNA, 15 bp, Homo sapiens
tgcatatcgtagata

SEQ ID NO: 2130594 - DNA, 15 bp, Homo sapiens
gcatatcgtagatac

SEQ ID NO: 2130595 - DNA, 15 bp, Homo sapiens
catatcgtagatact

SEQ ID NO: 2130596 - DNA, 15 bp, Homo sapiens
atatcgtagatactt

SEQ ID NO: 2130597 - DNA, 15 bp, Homo sapiens
tatcgtagatacttt

SEQ ID NO: 2130598 - DNA, 15 bp, Homo sapiens
atcgtagatactttt

SEQ ID NO: 2130599 - DNA, 15 bp, Homo sapiens
tcgtagatacttttt

SEQ ID NO: 2130600 - DNA, 15 bp, Homo sapiens
cgtagatacttttta

SEQ ID NO: 2130601 - DNA, 15 bp, Homo sapiens
gtagatactttttaa

SEQ ID NO: 2130602 - DNA, 15 bp, Homo sapiens
tagatactttttaag

SEQ ID NO: 2130603 - DNA, 15 bp, Homo sapiens
agatactttttaagt

SEQ ID NO: 2130604 - DNA, 15 bp, Homo sapiens
gatactttttaagtt

SEQ ID NO: 2130605 - DNA, 15 bp, Homo sapiens
atactttttaagttt

SEQ ID NO: 2130606 - DNA, 15 bp, Homo sapiens
tactttttaagtttg

SEQ ID NO: 2130607 - DNA, 15 bp, Homo sapiens
actttttaagtttgg

SEQ ID NO: 2130608 - DNA, 15 bp, Homo sapiens
ctttttaagtttgga

SEQ ID NO: 2130609 - DNA, 15 bp, Homo sapiens
tttttaagtttggaa

SEQ ID NO: 2130610 - DNA, 15 bp, Homo sapiens
ttttaagtttggaac

SEQ ID NO: 2130611 - DNA, 15 bp, Homo sapiens
tttaagtttggaacc

SEQ ID NO: 2130612 - DNA, 15 bp, Homo sapiens
ttaagtttggaacct

SEQ ID NO: 2130613 - DNA, 15 bp, Homo sapiens
taagtttggaacctt

SEQ ID NO: 2130614 - DNA, 15 bp, Homo sapiens
aagtttggaaccttt

SEQ ID NO: 2130615 - DNA, 15 bp, Homo sapiens
agtttggaacctttt

SEQ ID NO: 2130616 - DNA, 15 bp, Homo sapiens
gtttggaaccttttt

SEQ ID NO: 2130617 - DNA, 15 bp, Homo sapiens
tttggaacctttttg

SEQ ID NO: 2130618 - DNA, 15 bp, Homo sapiens
ttggaacctttttgc

SEQ ID NO: 2130619 - DNA, 15 bp, Homo sapiens
tggaacctttttgcc

SEQ ID NO: 2130620 - DNA, 15 bp, Homo sapiens
ggaacctttttgcca

SEQ ID NO: 2130621 - DNA, 15 bp, Homo sapiens
gaacctttttgccaa

SEQ ID NO: 2130622 - DNA, 15 bp, Homo sapiens
aacctttttgccaag

SEQ ID NO: 2130623 - DNA, 15 bp, Homo sapiens
acctttttgccaaga

SEQ ID NO: 2130624 - DNA, 15 bp, Homo sapiens
cctttttgccaagag

SEQ ID NO: 2130625 - DNA, 15 bp, Homo sapiens
ctttttgccaagagg

SEQ ID NO: 2130626 - DNA, 15 bp, Homo sapiens
tttttgccaagaggg

SEQ ID NO: 2130627 - DNA, 15 bp, Homo sapiens
ttttgccaagagggt

SEQ ID NO: 2130628 - DNA, 15 bp, Homo sapiens
tttgccaagagggta

SEQ ID NO: 2130629 - DNA, 15 bp, Homo sapiens
ttgccaagagggtag

SEQ ID NO: 2130630 - DNA, 15 bp, Homo sapiens
tgccaagagggtagt

SEQ ID NO: 2130631 - DNA, 15 bp, Homo sapiens
gccaagagggtagtg

SEQ ID NO: 2130632 - DNA, 15 bp, Homo sapiens
ccaagagggtagtgg

SEQ ID NO: 2130633 - DNA, 15 bp, Homo sapiens
caagagggtagtgga

SEQ ID NO: 2130634 - DNA, 15 bp, Homo sapiens
aagagggtagtggag

SEQ ID NO: 2130635 - DNA, 15 bp, Homo sapiens
agagggtagtggaga

SEQ ID NO: 2130636 - DNA, 15 bp, Homo sapiens
gagggtagtggagaa

SEQ ID NO: 2130637 - DNA, 15 bp, Homo sapiens
agggtagtggagaag

SEQ ID NO: 2130638 - DNA, 15 bp, Homo sapiens
gggtagtggagaagt

SEQ ID NO: 2130639 - DNA, 15 bp, Homo sapiens
ggtagtggagaagtg

SEQ ID NO: 2130640 - DNA, 15 bp, Homo sapiens
gtagtggagaagtga

SEQ ID NO: 2130641 - DNA, 15 bp, Homo sapiens
tagtggagaagtgaa

SEQ ID NO: 2130642 - DNA, 15 bp, Homo sapiens
agtggagaagtgaag

SEQ ID NO: 2130643 - DNA, 15 bp, Homo sapiens
gtggagaagtgaagt

SEQ ID NO: 2130644 - DNA, 15 bp, Homo sapiens
tggagaagtgaagtc

SEQ ID NO: 2130645 - DNA, 15 bp, Homo sapiens
ggagaagtgaagtca

SEQ ID NO: 2130646 - DNA, 15 bp, Homo sapiens
gagaagtgaagtcaa

SEQ ID NO: 2130647 - DNA, 15 bp, Homo sapiens
agaagtgaagtcaaa

SEQ ID NO: 2130648 - DNA, 15 bp, Homo sapiens
gaagtgaagtcaaaa

SEQ ID NO: 2130649 - DNA, 15 bp, Homo sapiens
aagtgaagtcaaaac

SEQ ID NO: 2130650 - DNA, 15 bp, Homo sapiens
agtgaagtcaaaacc

SEQ ID NO: 2130651 - DNA, 15 bp, Homo sapiens
gtgaagtcaaaacct

SEQ ID NO: 2130652 - DNA, 15 bp, Homo sapiens
tgaagtcaaaacctt

SEQ ID NO: 2130653 - DNA, 15 bp, Homo sapiens
gaagtcaaaaccttg

SEQ ID NO: 2130654 - DNA, 15 bp, Homo sapiens
aagtcaaaaccttga

SEQ ID NO: 2130655 - DNA, 15 bp, Homo sapiens
agtcaaaaccttgac

SEQ ID NO: 2130656 - DNA, 15 bp, Homo sapiens
gtcaaaaccttgacc

SEQ ID NO: 2130657 - DNA, 15 bp, Homo sapiens
tcaaaaccttgacct

SEQ ID NO: 2130658 - DNA, 15 bp, Homo sapiens
caaaaccttgacctt

SEQ ID NO: 2130659 - DNA, 15 bp, Homo sapiens
aaaaccttgaccttc

SEQ ID NO: 2130660 - DNA, 15 bp, Homo sapiens
aaaccttgaccttcc

SEQ ID NO: 2130661 - DNA, 15 bp, Homo sapiens
aaccttgaccttcct

SEQ ID NO: 2130662 - DNA, 15 bp, Homo sapiens
accttgaccttcctt

SEQ ID NO: 2130663 - DNA, 15 bp, Homo sapiens
ccttgaccttccttg

SEQ ID NO: 2130664 - DNA, 15 bp, Homo sapiens
cttgaccttccttgc

SEQ ID NO: 2130665 - DNA, 15 bp, Homo sapiens
ttgaccttccttgcc

SEQ ID NO: 2130666 - DNA, 15 bp, Homo sapiens
tgaccttccttgcct

SEQ ID NO: 2130667 - DNA, 15 bp, Homo sapiens
gaccttccttgccta

SEQ ID NO: 2130668 - DNA, 15 bp, Homo sapiens
accttccttgcctac

SEQ ID NO: 2130669 - DNA, 15 bp, Homo sapiens
ccttccttgcctact

SEQ ID NO: 2130670 - DNA, 15 bp, Homo sapiens
cttccttgcctactt

SEQ ID NO: 2130671 - DNA, 15 bp, Homo sapiens
ttccttgcctacttt

SEQ ID NO: 2130672 - DNA, 15 bp, Homo sapiens
tccttgcctacttta

SEQ ID NO: 2130673 - DNA, 15 bp, Homo sapiens
ccttgcctactttat

SEQ ID NO: 2130674 - DNA, 15 bp, Homo sapiens
cttgcctactttatg

SEQ ID NO: 2130675 - DNA, 15 bp, Homo sapiens
ttgcctactttatgc

SEQ ID NO: 2130676 - DNA, 15 bp, Homo sapiens
tgcctactttatgct

SEQ ID NO: 2130677 - DNA, 15 bp, Homo sapiens
gcctactttatgctg

SEQ ID NO: 2130678 - DNA, 15 bp, Homo sapiens
cctactttatgctgt

SEQ ID NO: 2130679 - DNA, 15 bp, Homo sapiens
ctactttatgctgta

SEQ ID NO: 2130680 - DNA, 15 bp, Homo sapiens
tactttatgctgtag

SEQ ID NO: 2130681 - DNA, 15 bp, Homo sapiens
actttatgctgtagt

SEQ ID NO: 2130682 - DNA, 15 bp, Homo sapiens
ctttatgctgtagtt

SEQ ID NO: 2130683 - DNA, 15 bp, Homo sapiens
tttatgctgtagttt

SEQ ID NO: 2130684 - DNA, 15 bp, Homo sapiens
ttatgctgtagttta

SEQ ID NO: 2130685 - DNA, 15 bp, Homo sapiens
tatgctgtagtttat

SEQ ID NO: 2130686 - DNA, 15 bp, Homo sapiens
atgctgtagtttata

SEQ ID NO: 2130687 - DNA, 15 bp, Homo sapiens
tgctgtagtttatat

SEQ ID NO: 2130688 - DNA, 15 bp, Homo sapiens
gctgtagtttatata

SEQ ID NO: 2130689 - DNA, 15 bp, Homo sapiens
ctgtagtttatatac

SEQ ID NO: 2130690 - DNA, 15 bp, Homo sapiens
tgtagtttatatacc

SEQ ID NO: 2130691 - DNA, 15 bp, Homo sapiens
tagtttatatacctt

SEQ ID NO: 2130692 - DNA, 15 bp, Homo sapiens
agtttatataccttc

SEQ ID NO: 2130693 - DNA, 15 bp, Homo sapiens
gtttatataccttct

SEQ ID NO: 2130694 - DNA, 15 bp, Homo sapiens
tttatataccttctt

SEQ ID NO: 2130695 - DNA, 15 bp, Homo sapiens
ttatataccttcttt

SEQ ID NO: 2130696 - DNA, 15 bp, Homo sapiens
tatataccttctttc

SEQ ID NO: 2130697 - DNA, 15 bp, Homo sapiens
atataccttctttcc

SEQ ID NO: 2130698 - DNA, 15 bp, Homo sapiens
tataccttctttcct

SEQ ID NO: 2130699 - DNA, 15 bp, Homo sapiens
ataccttctttcctc

SEQ ID NO: 2130700 - DNA, 15 bp, Homo sapiens
taccttctttcctcc

SEQ ID NO: 2130701 - DNA, 15 bp, Homo sapiens
accttctttcctccc

SEQ ID NO: 2130702 - DNA, 15 bp, Homo sapiens
ccttctttcctccca

SEQ ID NO: 2130703 - DNA, 15 bp, Homo sapiens
cttctttcctcccac

SEQ ID NO: 2130704 - DNA, 15 bp, Homo sapiens
ttctttcctcccacc

SEQ ID NO: 2130705 - DNA, 15 bp, Homo sapiens
tctttcctcccacct

SEQ ID NO: 2130706 - DNA, 15 bp, Homo sapiens
ctttcctcccacctt

SEQ ID NO: 2130707 - DNA, 15 bp, Homo sapiens
tttcctcccaccttt

SEQ ID NO: 2130708 - DNA, 15 bp, Homo sapiens
ttcctcccacctttc

SEQ ID NO: 2130709 - DNA, 15 bp, Homo sapiens
tcctcccacctttcg

SEQ ID NO: 2130710 - DNA, 15 bp, Homo sapiens
cctcccacctttcgt

SEQ ID NO: 2130711 - DNA, 15 bp, Homo sapiens
ctcccacctttcgta

SEQ ID NO: 2130712 - DNA, 15 bp, Homo sapiens
tcccacctttcgtaa

SEQ ID NO: 2130713 - DNA, 15 bp, Homo sapiens
cccacctttcgtaaa

SEQ ID NO: 2130714 - DNA, 15 bp, Homo sapiens
ccacctttcgtaaag

SEQ ID NO: 2130715 - DNA, 15 bp, Homo sapiens
cacctttcgtaaagc

SEQ ID NO: 2130716 - DNA, 15 bp, Homo sapiens
acctttcgtaaagct

SEQ ID NO: 2130717 - DNA, 15 bp, Homo sapiens
cctttcgtaaagcta

SEQ ID NO: 2130718 - DNA, 15 bp, Homo sapiens
ctttcgtaaagctaa

SEQ ID NO: 2130719 - DNA, 15 bp, Homo sapiens
tttcgtaaagctaaa

SEQ ID NO: 2130720 - DNA, 15 bp, Homo sapiens
ttcgtaaagctaaaa

SEQ ID NO: 2130721 - DNA, 15 bp, Homo sapiens
tcgtaaagctaaaag

SEQ ID NO: 2130722 - DNA, 15 bp, Homo sapiens
cgtaaagctaaaaga

SEQ ID NO: 2130723 - DNA, 15 bp, Homo sapiens
gtaaagctaaaagaa

SEQ ID NO: 2130724 - DNA, 15 bp, Homo sapiens
taaagctaaaagaag

SEQ ID NO: 2130725 - DNA, 15 bp, Homo sapiens
aaagctaaaagaagc

SEQ ID NO: 2130726 - DNA, 15 bp, Homo sapiens
aagctaaaagaagct

SEQ ID NO: 2130727 - DNA, 15 bp, Homo sapiens
agctaaaagaagctt

SEQ ID NO: 2130728 - DNA, 15 bp, Homo sapiens
gctaaaagaagctta

SEQ ID NO: 2130729 - DNA, 15 bp, Homo sapiens
ctaaaagaagcttag

SEQ ID NO: 2130730 - DNA, 15 bp, Homo sapiens
taaaagaagcttagc

SEQ ID NO: 2130731 - DNA, 15 bp, Homo sapiens
aaaagaagcttagcc

SEQ ID NO: 2130732 - DNA, 15 bp, Homo sapiens
aaagaagcttagcct

SEQ ID NO: 2130733 - DNA, 15 bp, Homo sapiens
aagaagcttagcctc

SEQ ID NO: 2130734 - DNA, 15 bp, Homo sapiens
agaagcttagcctcc

SEQ ID NO: 2130735 - DNA, 15 bp, Homo sapiens
gaagcttagcctcct

SEQ ID NO: 2130736 - DNA, 15 bp, Homo sapiens
aagcttagcctcctt

SEQ ID NO: 2130737 - DNA, 15 bp, Homo sapiens
agcttagcctcctta

SEQ ID NO: 2130738 - DNA, 15 bp, Homo sapiens
gcttagcctccttaa

SEQ ID NO: 2130739 - DNA, 15 bp, Homo sapiens
cttagcctccttaat

SEQ ID NO: 2130740 - DNA, 15 bp, Homo sapiens
ttagcctccttaatg

SEQ ID NO: 2130741 - DNA, 15 bp, Homo sapiens
tagcctccttaatgt

SEQ ID NO: 2130742 - DNA, 15 bp, Homo sapiens
agcctccttaatgtt

SEQ ID NO: 2130743 - DNA, 15 bp, Homo sapiens
gcctccttaatgttt

SEQ ID NO: 2130744 - DNA, 15 bp, Homo sapiens
cctccttaatgtttt

SEQ ID NO: 2130745 - DNA, 15 bp, Homo sapiens
ctccttaatgttttc

SEQ ID NO: 2130746 - DNA, 15 bp, Homo sapiens
tccttaatgttttcc

SEQ ID NO: 2130747 - DNA, 15 bp, Homo sapiens
ccttaatgttttcca

SEQ ID NO: 2130748 - DNA, 15 bp, Homo sapiens
cttaatgttttccag

SEQ ID NO: 2130749 - DNA, 15 bp, Homo sapiens
ttaatgttttccagc

SEQ ID NO: 2130750 - DNA, 15 bp, Homo sapiens
taatgttttccagct

SEQ ID NO: 2130751 - DNA, 15 bp, Homo sapiens
aatgttttccagctg

SEQ ID NO: 2130752 - DNA, 15 bp, Homo sapiens
tttccagctgacaaa

SEQ ID NO: 2130753 - DNA, 15 bp, Homo sapiens
ttccagctgacaaaa

SEQ ID NO: 2130754 - DNA, 15 bp, Homo sapiens
tccagctgacaaaat

SEQ ID NO: 2130755 - DNA, 15 bp, Homo sapiens
ccagctgacaaaata

SEQ ID NO: 2130756 - DNA, 15 bp, Homo sapiens
cagctgacaaaatat

SEQ ID NO: 2130757 - DNA, 15 bp, Homo sapiens
agctgacaaaatatt

SEQ ID NO: 2130758 - DNA, 15 bp, Homo sapiens
gctgacaaaatattg

SEQ ID NO: 2130759 - DNA, 15 bp, Homo sapiens
ctgacaaaatattgt

SEQ ID NO: 2130760 - DNA, 15 bp, Homo sapiens
tgacaaaatattgtt

SEQ ID NO: 2130761 - DNA, 15 bp, Homo sapiens
gacaaaatattgttt

SEQ ID NO: 2130762 - DNA, 15 bp, Homo sapiens
acaaaatattgttta

SEQ ID NO: 2130763 - DNA, 15 bp, Homo sapiens
caaaatattgtttaa

SEQ ID NO: 2130764 - DNA, 15 bp, Homo sapiens
aaaatattgtttaac

SEQ ID NO: 2130765 - DNA, 15 bp, Homo sapiens
aaatattgtttaaca

SEQ ID NO: 2130766 - DNA, 15 bp, Homo sapiens
aatattgtttaacat

SEQ ID NO: 2130767 - DNA, 15 bp, Homo sapiens
atattgtttaacata

SEQ ID NO: 2130768 - DNA, 15 bp, Homo sapiens
tattgtttaacataa

SEQ ID NO: 2130769 - DNA, 15 bp, Homo sapiens
attgtttaacataac

SEQ ID NO: 2130770 - DNA, 15 bp, Homo sapiens
ttgtttaacataaca

SEQ ID NO: 2130771 - DNA, 15 bp, Homo sapiens
tgtttaacataacat

SEQ ID NO: 2130772 - DNA, 15 bp, Homo sapiens
gtttaacataacatt

SEQ ID NO: 2130773 - DNA, 15 bp, Homo sapiens
tttaacataacattc

SEQ ID NO: 2130774 - DNA, 15 bp, Homo sapiens
ttaacataacattcg

SEQ ID NO: 2130775 - DNA, 15 bp, Homo sapiens
taacataacattcga

SEQ ID NO: 2130776 - DNA, 15 bp, Homo sapiens
aacataacattcgaa

SEQ ID NO: 2130777 - DNA, 15 bp, Homo sapiens
acataacattcgaaa

SEQ ID NO: 2130778 - DNA, 15 bp, Homo sapiens
cataacattcgaaac

SEQ ID NO: 2130779 - DNA, 15 bp, Homo sapiens
ataacattcgaaact

SEQ ID NO: 2130780 - DNA, 15 bp, Homo sapiens
taacattcgaaactt

SEQ ID NO: 2130781 - DNA, 15 bp, Homo sapiens
aacattcgaaacttt

SEQ ID NO: 2130782 - DNA, 15 bp, Homo sapiens
acattcgaaactttt

SEQ ID NO: 2130783 - DNA, 15 bp, Homo sapiens
cattcgaaacttttt

SEQ ID NO: 2130784 - DNA, 15 bp, Homo sapiens
attcgaaactttttt

SEQ ID NO: 2130785 - DNA, 15 bp, Homo sapiens
ttcgaaacttttttt

SEQ ID NO: 2130786 - DNA, 15 bp, Homo sapiens
tcgaaactttttttc

SEQ ID NO: 2130787 - DNA, 15 bp, Homo sapiens
cgaaactttttttct

SEQ ID NO: 2130788 - DNA, 15 bp, Homo sapiens
gaaactttttttctg

SEQ ID NO: 2130789 - DNA, 15 bp, Homo sapiens
aaactttttttctgg

SEQ ID NO: 2130790 - DNA, 15 bp, Homo sapiens
aactttttttctggt

SEQ ID NO: 2130791 - DNA, 15 bp, Homo sapiens
actttttttctggtg

SEQ ID NO: 2130792 - DNA, 15 bp, Homo sapiens
ctttttttctggtgc

SEQ ID NO: 2130793 - DNA, 15 bp, Homo sapiens
tttttttctggtgca

SEQ ID NO: 2130794 - DNA, 15 bp, Homo sapiens
ttttttctggtgcac

SEQ ID NO: 2130795 - DNA, 15 bp, Homo sapiens
tttttctggtgcaca

SEQ ID NO: 2130796 - DNA, 15 bp, Homo sapiens
ttttctggtgcacat

SEQ ID NO: 2130797 - DNA, 15 bp, Homo sapiens
tttctggtgcacatt

SEQ ID NO: 2130798 - DNA, 15 bp, Homo sapiens
ttctggtgcacattc

SEQ ID NO: 2130799 - DNA, 15 bp, Homo sapiens
tctggtgcacattca

SEQ ID NO: 2130800 - DNA, 15 bp, Homo sapiens
ctggtgcacattcat

SEQ ID NO: 2130801 - DNA, 15 bp, Homo sapiens
tggtgcacattcatg

SEQ ID NO: 2130802 - DNA, 15 bp, Homo sapiens
ggtgcacattcatgc

SEQ ID NO: 2130803 - DNA, 15 bp, Homo sapiens
gtgcacattcatgca

SEQ ID NO: 2130804 - DNA, 15 bp, Homo sapiens
tgcacattcatgcat

SEQ ID NO: 2130805 - DNA, 15 bp, Homo sapiens
gcacattcatgcatc

SEQ ID NO: 2130806 - DNA, 15 bp, Homo sapiens
cacattcatgcatca

SEQ ID NO: 2130807 - DNA, 15 bp, Homo sapiens
acattcatgcatcac

SEQ ID NO: 2130808 - DNA, 15 bp, Homo sapiens
cattcatgcatcaca

SEQ ID NO: 2130809 - DNA, 15 bp, Homo sapiens
attcatgcatcacag

SEQ ID NO: 2130810 - DNA, 15 bp, Homo sapiens
ttcatgcatcacagc

SEQ ID NO: 2130811 - DNA, 15 bp, Homo sapiens
tcatgcatcacagca

SEQ ID NO: 2130812 - DNA, 15 bp, Homo sapiens
catgcatcacagcag

SEQ ID NO: 2130813 - DNA, 15 bp, Homo sapiens
atgcatcacagcagg

SEQ ID NO: 2130814 - DNA, 15 bp, Homo sapiens
tgcatcacagcagga

SEQ ID NO: 2130815 - DNA, 15 bp, Homo sapiens
gcatcacagcaggag

SEQ ID NO: 2130816 - DNA, 15 bp, Homo sapiens
catcacagcaggagc

SEQ ID NO: 2130817 - DNA, 15 bp, Homo sapiens
atcacagcaggagca

SEQ ID NO: 2130818 - DNA, 15 bp, Homo sapiens
tcacagcaggagcaa

SEQ ID NO: 2130819 - DNA, 15 bp, Homo sapiens
cacagcaggagcaac

SEQ ID NO: 2130820 - DNA, 15 bp, Homo sapiens
acagcaggagcaaca

SEQ ID NO: 2130821 - DNA, 15 bp, Homo sapiens
cagcaggagcaacaa

SEQ ID NO: 2130822 - DNA, 15 bp, Homo sapiens
agcaggagcaacaag

SEQ ID NO: 2130823 - DNA, 15 bp, Homo sapiens
gcaggagcaacaaga

SEQ ID NO: 2130824 - DNA, 15 bp, Homo sapiens
caggagcaacaagaa

SEQ ID NO: 2130825 - DNA, 15 bp, Homo sapiens
aggagcaacaagaac

SEQ ID NO: 2130826 - DNA, 15 bp, Homo sapiens
ggagcaacaagaacc

SEQ ID NO: 2130827 - DNA, 15 bp, Homo sapiens
gagcaacaagaacca

SEQ ID NO: 2130828 - DNA, 15 bp, Homo sapiens
agcaacaagaaccat

SEQ ID NO: 2130829 - DNA, 15 bp, Homo sapiens
gcaacaagaaccata

SEQ ID NO: 2130830 - DNA, 15 bp, Homo sapiens
caacaagaaccatat

SEQ ID NO: 2130831 - DNA, 15 bp, Homo sapiens
aacaagaaccatata

SEQ ID NO: 2130832 - DNA, 15 bp, Homo sapiens
acaagaaccatataa

SEQ ID NO: 2130833 - DNA, 15 bp, Homo sapiens
caagaaccatataag

SEQ ID NO: 2130834 - DNA, 15 bp, Homo sapiens
aagaaccatataagt

SEQ ID NO: 2130835 - DNA, 15 bp, Homo sapiens
agaaccatataagtg

SEQ ID NO: 2130836 - DNA, 15 bp, Homo sapiens
gaaccatataagtga

SEQ ID NO: 2130837 - DNA, 15 bp, Homo sapiens
aaccatataagtgaa

SEQ ID NO: 2130838 - DNA, 15 bp, Homo sapiens
accatataagtgaac

SEQ ID NO: 2130839 - DNA, 15 bp, Homo sapiens
ccatataagtgaact

SEQ ID NO: 2130840 - DNA, 15 bp, Homo sapiens
catataagtgaactg

SEQ ID NO: 2130841 - DNA, 15 bp, Homo sapiens
atataagtgaactgg

SEQ ID NO: 2130842 - DNA, 15 bp, Homo sapiens
tataagtgaactggc

SEQ ID NO: 2130843 - DNA, 15 bp, Homo sapiens
ataagtgaactggct

SEQ ID NO: 2130844 - DNA, 15 bp, Homo sapiens
taagtgaactggctt

SEQ ID NO: 2130845 - DNA, 15 bp, Homo sapiens
aagtgaactggcttc

SEQ ID NO: 2130846 - DNA, 15 bp, Homo sapiens
agtgaactggcttca

SEQ ID NO: 2130847 - DNA, 15 bp, Homo sapiens
gtgaactggcttcac

SEQ ID NO: 2130848 - DNA, 15 bp, Homo sapiens
tgaactggcttcact

SEQ ID NO: 2130849 - DNA, 15 bp, Homo sapiens
gaactggcttcactt

SEQ ID NO: 2130850 - DNA, 15 bp, Homo sapiens
aactggcttcactta

SEQ ID NO: 2130851 - DNA, 15 bp, Homo sapiens
actggcttcacttat

SEQ ID NO: 2130852 - DNA, 15 bp, Homo sapiens
ctggcttcacttata

SEQ ID NO: 2130853 - DNA, 15 bp, Homo sapiens
tggcttcacttatag

SEQ ID NO: 2130854 - DNA, 15 bp, Homo sapiens
ggcttcacttatagc

SEQ ID NO: 2130855 - DNA, 15 bp, Homo sapiens
gcttcacttatagcc

SEQ ID NO: 2130856 - DNA, 15 bp, Homo sapiens
cttcacttatagccc

SEQ ID NO: 2130857 - DNA, 15 bp, Homo sapiens
ttcacttatagcccg

SEQ ID NO: 2130858 - DNA, 15 bp, Homo sapiens
tcacttatagcccgt

SEQ ID NO: 2130859 - DNA, 15 bp, Homo sapiens
cacttatagcccgtt

SEQ ID NO: 2130860 - DNA, 15 bp, Homo sapiens
acttatagcccgttt

SEQ ID NO: 2130861 - DNA, 15 bp, Homo sapiens
cttatagcccgtttt

SEQ ID NO: 2130862 - DNA, 15 bp, Homo sapiens
ttatagcccgtttta

SEQ ID NO: 2130863 - DNA, 15 bp, Homo sapiens
tatagcccgttttaa

SEQ ID NO: 2130864 - DNA, 15 bp, Homo sapiens
atagcccgttttaat

SEQ ID NO: 2130865 - DNA, 15 bp, Homo sapiens
tagcccgttttaatt

SEQ ID NO: 2130866 - DNA, 15 bp, Homo sapiens
agcccgttttaattc

SEQ ID NO: 2130867 - DNA, 15 bp, Homo sapiens
gcccgttttaattca

SEQ ID NO: 2130868 - DNA, 15 bp, Homo sapiens
cccgttttaattcat

SEQ ID NO: 2130869 - DNA, 15 bp, Homo sapiens
ccgttttaattcata

SEQ ID NO: 2130870 - DNA, 15 bp, Homo sapiens
cgttttaattcatat

SEQ ID NO: 2130871 - DNA, 15 bp, Homo sapiens
gttttaattcatatc

SEQ ID NO: 2130872 - DNA, 15 bp, Homo sapiens
ttttaattcatatcc

SEQ ID NO: 2130873 - DNA, 15 bp, Homo sapiens
tttaattcatatcca

SEQ ID NO: 2130874 - DNA, 15 bp, Homo sapiens
ttaattcatatccat

SEQ ID NO: 2130875 - DNA, 15 bp, Homo sapiens
taattcatatccata

SEQ ID NO: 2130876 - DNA, 15 bp, Homo sapiens
aattcatatccatat

SEQ ID NO: 2130877 - DNA, 15 bp, Homo sapiens
attcatatccatatt

SEQ ID NO: 2130878 - DNA, 15 bp, Homo sapiens
ttcatatccatattt

SEQ ID NO: 2130879 - DNA, 15 bp, Homo sapiens
tcatatccatatttc

SEQ ID NO: 2130880 - DNA, 15 bp, Homo sapiens
catatccatatttcc

SEQ ID NO: 2130881 - DNA, 15 bp, Homo sapiens
atatccatatttcct

SEQ ID NO: 2130882 - DNA, 15 bp, Homo sapiens
tatccatatttcctc

SEQ ID NO: 2130883 - DNA, 15 bp, Homo sapiens
atccatatttcctca

SEQ ID NO: 2130884 - DNA, 15 bp, Homo sapiens
tccatatttcctcag

SEQ ID NO: 2130885 - DNA, 15 bp, Homo sapiens
ccatatttcctcagg

SEQ ID NO: 2130886 - DNA, 15 bp, Homo sapiens
catatttcctcaggg

SEQ ID NO: 2130887 - DNA, 15 bp, Homo sapiens
atatttcctcagggc

SEQ ID NO: 2130888 - DNA, 15 bp, Homo sapiens
tatttcctcagggct

SEQ ID NO: 2130889 - DNA, 15 bp, Homo sapiens
atttcctcagggctt

SEQ ID NO: 2130890 - DNA, 15 bp, Homo sapiens
tttcctcagggcttg

SEQ ID NO: 2130891 - DNA, 15 bp, Homo sapiens
ttcctcagggcttgt

SEQ ID NO: 2130892 - DNA, 15 bp, Homo sapiens
tcctcagggcttgtt

SEQ ID NO: 2130893 - DNA, 15 bp, Homo sapiens
cctcagggcttgttt

SEQ ID NO: 2130894 - DNA, 15 bp, Homo sapiens
ctcagggcttgtttc

SEQ ID NO: 2130895 - DNA, 15 bp, Homo sapiens
tcagggcttgtttcc

SEQ ID NO: 2130896 - DNA, 15 bp, Homo sapiens
cagggcttgtttcca

SEQ ID NO: 2130897 - DNA, 15 bp, Homo sapiens
agggcttgtttccat

SEQ ID NO: 2130898 - DNA, 15 bp, Homo sapiens
gggcttgtttccatg

SEQ ID NO: 2130899 - DNA, 15 bp, Homo sapiens
ggcttgtttccatgc

SEQ ID NO: 2130900 - DNA, 15 bp, Homo sapiens
gcttgtttccatgcc

SEQ ID NO: 2130901 - DNA, 15 bp, Homo sapiens
cttgtttccatgcct

SEQ ID NO: 2130902 - DNA, 15 bp, Homo sapiens
ttgtttccatgcctc

SEQ ID NO: 2130903 - DNA, 15 bp, Homo sapiens
tgtttccatgcctcc

SEQ ID NO: 2130904 - DNA, 15 bp, Homo sapiens
gtttccatgcctccc

SEQ ID NO: 2130905 - DNA, 15 bp, Homo sapiens
tttccatgcctccca

SEQ ID NO: 2130906 - DNA, 15 bp, Homo sapiens
ttccatgcctcccag

SEQ ID NO: 2130907 - DNA, 15 bp, Homo sapiens
tccatgcctcccagc

SEQ ID NO: 2130908 - DNA, 15 bp, Homo sapiens
ccatgcctcccagcc

SEQ ID NO: 2130909 - DNA, 15 bp, Homo sapiens
catgcctcccagccc

SEQ ID NO: 2130910 - DNA, 15 bp, Homo sapiens
atgcctcccagcccc

SEQ ID NO: 2130911 - DNA, 15 bp, Homo sapiens
tgcctcccagcccca

SEQ ID NO: 2130912 - DNA, 15 bp, Homo sapiens
gcctcccagccccac

SEQ ID NO: 2130913 - DNA, 15 bp, Homo sapiens
cctcccagccccact

SEQ ID NO: 2130914 - DNA, 15 bp, Homo sapiens
ctcccagccccactc

SEQ ID NO: 2130915 - DNA, 15 bp, Homo sapiens
tcccagccccactcc

SEQ ID NO: 2130916 - DNA, 15 bp, Homo sapiens
cccagccccactcca

SEQ ID NO: 2130917 - DNA, 15 bp, Homo sapiens
ccagccccactccat

SEQ ID NO: 2130918 - DNA, 15 bp, Homo sapiens
cagccccactccata

SEQ ID NO: 2130919 - DNA, 15 bp, Homo sapiens
agccccactccatat

SEQ ID NO: 2130920 - DNA, 15 bp, Homo sapiens
gccccactccatatg

SEQ ID NO: 2130921 - DNA, 15 bp, Homo sapiens
ccccactccatatgc

SEQ ID NO: 2130922 - DNA, 15 bp, Homo sapiens
cccactccatatgct

SEQ ID NO: 2130923 - DNA, 15 bp, Homo sapiens
ccactccatatgctt

SEQ ID NO: 2130924 - DNA, 15 bp, Homo sapiens
cactccatatgctta

SEQ ID NO: 2130925 - DNA, 15 bp, Homo sapiens
actccatatgcttaa

SEQ ID NO: 2130926 - DNA, 15 bp, Homo sapiens
ctccatatgcttaac

SEQ ID NO: 2130927 - DNA, 15 bp, Homo sapiens
tccatatgcttaaca

SEQ ID NO: 2130928 - DNA, 15 bp, Homo sapiens
ccatatgcttaacaa

SEQ ID NO: 2130929 - DNA, 15 bp, Homo sapiens
catatgcttaacaac

SEQ ID NO: 2130930 - DNA, 15 bp, Homo sapiens
atatgcttaacaaca

SEQ ID NO: 2130931 - DNA, 15 bp, Homo sapiens
tatgcttaacaacat

SEQ ID NO: 2130932 - DNA, 15 bp, Homo sapiens
tgcttaacaacattg

SEQ ID NO: 2130933 - DNA, 15 bp, Homo sapiens
gcttaacaacattgt

SEQ ID NO: 2130934 - DNA, 15 bp, Homo sapiens
cttaacaacattgtc

SEQ ID NO: 2130935 - DNA, 15 bp, Homo sapiens
ttaacaacattgtct

SEQ ID NO: 2130936 - DNA, 15 bp, Homo sapiens
taacaacattgtctg

SEQ ID NO: 2130937 - DNA, 15 bp, Homo sapiens
aacaacattgtctgg

SEQ ID NO: 2130938 - DNA, 15 bp, Homo sapiens
acaacattgtctggc

SEQ ID NO: 2130939 - DNA, 15 bp, Homo sapiens
caacattgtctggct

SEQ ID NO: 2130940 - DNA, 15 bp, Homo sapiens
aacattgtctggctg

SEQ ID NO: 2130941 - DNA, 15 bp, Homo sapiens
acattgtctggctga

SEQ ID NO: 2130942 - DNA, 15 bp, Homo sapiens
cattgtctggctgac

SEQ ID NO: 2130943 - DNA, 15 bp, Homo sapiens
attgtctggctgact

SEQ ID NO: 2130944 - DNA, 15 bp, Homo sapiens
ttgtctggctgactg

SEQ ID NO: 2130945 - DNA, 15 bp, Homo sapiens
tgtctggctgactga

SEQ ID NO: 2130946 - DNA, 15 bp, Homo sapiens
gtctggctgactgag

SEQ ID NO: 2130947 - DNA, 15 bp, Homo sapiens
tctggctgactgagg

SEQ ID NO: 2130948 - DNA, 15 bp, Homo sapiens
ctggctgactgaggg

SEQ ID NO: 2130949 - DNA, 15 bp, Homo sapiens
tggctgactgagggt

SEQ ID NO: 2130950 - DNA, 15 bp, Homo sapiens
ggctgactgagggtt

SEQ ID NO: 2130951 - DNA, 15 bp, Homo sapiens
gctgactgagggtta

SEQ ID NO: 2130952 - DNA, 15 bp, Homo sapiens
ctgactgagggttat

SEQ ID NO: 2130953 - DNA, 15 bp, Homo sapiens
tgactgagggttata

SEQ ID NO: 2130954 - DNA, 15 bp, Homo sapiens
gactgagggttatat

SEQ ID NO: 2130955 - DNA, 15 bp, Homo sapiens
actgagggttatata

SEQ ID NO: 2130956 - DNA, 15 bp, Homo sapiens
ctgagggttatatac

SEQ ID NO: 2130957 - DNA, 15 bp, Homo sapiens
tgagggttatataca

SEQ ID NO: 2130958 - DNA, 15 bp, Homo sapiens
gagggttatatacat

SEQ ID NO: 2130959 - DNA, 15 bp, Homo sapiens
agggttatatacatc

SEQ ID NO: 2130960 - DNA, 15 bp, Homo sapiens
gggttatatacatca

SEQ ID NO: 2130961 - DNA, 15 bp, Homo sapiens
ggttatatacatcat

SEQ ID NO: 2130962 - DNA, 15 bp, Homo sapiens
gttatatacatcatg

SEQ ID NO: 2130963 - DNA, 15 bp, Homo sapiens
ttatatacatcatgg

SEQ ID NO: 2130964 - DNA, 15 bp, Homo sapiens
tatatacatcatggt

SEQ ID NO: 2130965 - DNA, 15 bp, Homo sapiens
atatacatcatggtc

SEQ ID NO: 2130966 - DNA, 15 bp, Homo sapiens
tatacatcatggtct

SEQ ID NO: 2130967 - DNA, 15 bp, Homo sapiens
atacatcatggtctt

SEQ ID NO: 2130968 - DNA, 15 bp, Homo sapiens
tacatcatggtcttg

SEQ ID NO: 2130969 - DNA, 15 bp, Homo sapiens
acatcatggtcttga

SEQ ID NO: 2130970 - DNA, 15 bp, Homo sapiens
catcatggtcttgaa

SEQ ID NO: 2130971 - DNA, 15 bp, Homo sapiens
atcatggtcttgaac

SEQ ID NO: 2130972 - DNA, 15 bp, Homo sapiens
tcatggtcttgaacc

SEQ ID NO: 2130973 - DNA, 15 bp, Homo sapiens
catggtcttgaacct

SEQ ID NO: 2130974 - DNA, 15 bp, Homo sapiens
atggtcttgaacctt

SEQ ID NO: 2130975 - DNA, 15 bp, Homo sapiens
tggtcttgaaccttc

SEQ ID NO: 2130976 - DNA, 15 bp, Homo sapiens
ggtcttgaaccttct

SEQ ID NO: 2130977 - DNA, 15 bp, Homo sapiens
gtcttgaaccttctt

SEQ ID NO: 2130978 - DNA, 15 bp, Homo sapiens
tcttgaaccttcttg

SEQ ID NO: 2130979 - DNA, 15 bp, Homo sapiens
cttgaaccttcttgg

SEQ ID NO: 2130980 - DNA, 15 bp, Homo sapiens
ttgaaccttcttgga

SEQ ID NO: 2130981 - DNA, 15 bp, Homo sapiens
tgaaccttcttggaa

SEQ ID NO: 2130982 - DNA, 15 bp, Homo sapiens
gaaccttcttggaaa

SEQ ID NO: 2130983 - DNA, 15 bp, Homo sapiens
aaccttcttggaaac

SEQ ID NO: 2130984 - DNA, 15 bp, Homo sapiens
accttcttggaaaca

SEQ ID NO: 2130985 - DNA, 15 bp, Homo sapiens
ccttcttggaaacat

SEQ ID NO: 2130986 - DNA, 15 bp, Homo sapiens
cttcttggaaacatg

SEQ ID NO: 2130987 - DNA, 15 bp, Homo sapiens
ttcttggaaacatgg

SEQ ID NO: 2130988 - DNA, 15 bp, Homo sapiens
tcttggaaacatggt

SEQ ID NO: 2130989 - DNA, 15 bp, Homo sapiens
cttggaaacatggtc

SEQ ID NO: 2130990 - DNA, 15 bp, Homo sapiens
ttggaaacatggtct

SEQ ID NO: 2130991 - DNA, 15 bp, Homo sapiens
tggaaacatggtctg

SEQ ID NO: 2130992 - DNA, 15 bp, Homo sapiens
ggaaacatggtctgt

SEQ ID NO: 2130993 - DNA, 15 bp, Homo sapiens
gaaacatggtctgtg

SEQ ID NO: 2130994 - DNA, 15 bp, Homo sapiens
aaacatggtctgtgc

SEQ ID NO: 2130995 - DNA, 15 bp, Homo sapiens
aacatggtctgtgcc

SEQ ID NO: 2130996 - DNA, 15 bp, Homo sapiens
acatggtctgtgcca

SEQ ID NO: 2130997 - DNA, 15 bp, Homo sapiens
catggtctgtgccat

SEQ ID NO: 2130998 - DNA, 15 bp, Homo sapiens
atggtctgtgccatt

SEQ ID NO: 2130999 - DNA, 15 bp, Homo sapiens
tggtctgtgccattg

SEQ ID NO: 2131000 - DNA, 15 bp, Homo sapiens
ggtctgtgccattgt

SEQ ID NO: 2131001 - DNA, 15 bp, Homo sapiens
gtctgtgccattgtt

SEQ ID NO: 2131002 - DNA, 15 bp, Homo sapiens
tctgtgccattgttt

SEQ ID NO: 2131003 - DNA, 15 bp, Homo sapiens
ctgtgccattgtttc

SEQ ID NO: 2131004 - DNA, 15 bp, Homo sapiens
tgtgccattgtttct

SEQ ID NO: 2131005 - DNA, 15 bp, Homo sapiens
gtgccattgtttctc

SEQ ID NO: 2131006 - DNA, 15 bp, Homo sapiens
tgccattgtttctca

SEQ ID NO: 2131007 - DNA, 15 bp, Homo sapiens
gccattgtttctcaa

SEQ ID NO: 2131008 - DNA, 15 bp, Homo sapiens
ccattgtttctcaaa

SEQ ID NO: 2131009 - DNA, 15 bp, Homo sapiens
cattgtttctcaaac

SEQ ID NO: 2131010 - DNA, 15 bp, Homo sapiens
attgtttctcaaacc

SEQ ID NO: 2131011 - DNA, 15 bp, Homo sapiens
ttgtttctcaaaccc

SEQ ID NO: 2131012 - DNA, 15 bp, Homo sapiens
tgtttctcaaaccca

SEQ ID NO: 2131013 - DNA, 15 bp, Homo sapiens
gtttctcaaacccaa

SEQ ID NO: 2131014 - DNA, 15 bp, Homo sapiens
tttctcaaacccaag

SEQ ID NO: 2131015 - DNA, 15 bp, Homo sapiens
ttctcaaacccaagt

SEQ ID NO: 2131016 - DNA, 15 bp, Homo sapiens
tctcaaacccaagta

SEQ ID NO: 2131017 - DNA, 15 bp, Homo sapiens
ctcaaacccaagtaa

SEQ ID NO: 2131018 - DNA, 15 bp, Homo sapiens
tcaaacccaagtaat

SEQ ID NO: 2131019 - DNA, 15 bp, Homo sapiens
caaacccaagtaatg

SEQ ID NO: 2131020 - DNA, 15 bp, Homo sapiens
aaacccaagtaatgc

SEQ ID NO: 2131021 - DNA, 15 bp, Homo sapiens
aacccaagtaatgct

SEQ ID NO: 2131022 - DNA, 15 bp, Homo sapiens
acccaagtaatgctt

SEQ ID NO: 2131023 - DNA, 15 bp, Homo sapiens
cccaagtaatgcttc

SEQ ID NO: 2131024 - DNA, 15 bp, Homo sapiens
ccaagtaatgcttca

SEQ ID NO: 2131025 - DNA, 15 bp, Homo sapiens
caagtaatgcttcat

SEQ ID NO: 2131026 - DNA, 15 bp, Homo sapiens
aagtaatgcttcatg

SEQ ID NO: 2131027 - DNA, 15 bp, Homo sapiens
agtaatgcttcatga

SEQ ID NO: 2131028 - DNA, 15 bp, Homo sapiens
gtaatgcttcatgat

SEQ ID NO: 2131029 - DNA, 15 bp, Homo sapiens
taatgcttcatgatg

SEQ ID NO: 2131030 - DNA, 15 bp, Homo sapiens
aatgcttcatgatga

SEQ ID NO: 2131031 - DNA, 15 bp, Homo sapiens
atgcttcatgatgaa

SEQ ID NO: 2131032 - DNA, 15 bp, Homo sapiens
tgcttcatgatgaaa

SEQ ID NO: 2131033 - DNA, 15 bp, Homo sapiens
gcttcatgatgaaac

SEQ ID NO: 2131034 - DNA, 15 bp, Homo sapiens
cttcatgatgaaaca

SEQ ID NO: 2131035 - DNA, 15 bp, Homo sapiens
ttcatgatgaaacac

SEQ ID NO: 2131036 - DNA, 15 bp, Homo sapiens
tcatgatgaaacacc

SEQ ID NO: 2131037 - DNA, 15 bp, Homo sapiens
catgatgaaacacct

SEQ ID NO: 2131038 - DNA, 15 bp, Homo sapiens
atgatgaaacacctt

SEQ ID NO: 2131039 - DNA, 15 bp, Homo sapiens
tgatgaaacaccttc

SEQ ID NO: 2131040 - DNA, 15 bp, Homo sapiens
gatgaaacaccttct

SEQ ID NO: 2131041 - DNA, 15 bp, Homo sapiens
atgaaacaccttcta

SEQ ID NO: 2131042 - DNA, 15 bp, Homo sapiens
tgaaacaccttctaa

SEQ ID NO: 2131043 - DNA, 15 bp, Homo sapiens
gaaacaccttctaaa

SEQ ID NO: 2131044 - DNA, 15 bp, Homo sapiens
aaacaccttctaaag

SEQ ID NO: 2131045 - DNA, 15 bp, Homo sapiens
aacaccttctaaagg

SEQ ID NO: 2131046 - DNA, 15 bp, Homo sapiens
acaccttctaaagga

SEQ ID NO: 2131047 - DNA, 15 bp, Homo sapiens
caccttctaaaggaa

SEQ ID NO: 2131048 - DNA, 15 bp, Homo sapiens
accttctaaaggaac

SEQ ID NO: 2131049 - DNA, 15 bp, Homo sapiens
ccttctaaaggaaca

SEQ ID NO: 2131050 - DNA, 15 bp, Homo sapiens
cttctaaaggaacaa

SEQ ID NO: 2131051 - DNA, 15 bp, Homo sapiens
ttctaaaggaacaaa

SEQ ID NO: 2131052 - DNA, 15 bp, Homo sapiens
tctaaaggaacaaaa

SEQ ID NO: 2131053 - DNA, 15 bp, Homo sapiens
ctaaaggaacaaaat

SEQ ID NO: 2131054 - DNA, 15 bp, Homo sapiens
taaaggaacaaaatt

SEQ ID NO: 2131055 - DNA, 15 bp, Homo sapiens
aaaggaacaaaattt

SEQ ID NO: 2131056 - DNA, 15 bp, Homo sapiens
aaggaacaaaatttt

SEQ ID NO: 2131057 - DNA, 15 bp, Homo sapiens
aggaacaaaattttc

SEQ ID NO: 2131058 - DNA, 15 bp, Homo sapiens
ggaacaaaattttct

SEQ ID NO: 2131059 - DNA, 15 bp, Homo sapiens
gaacaaaattttctg

SEQ ID NO: 2131060 - DNA, 15 bp, Homo sapiens
aacaaaattttctga

SEQ ID NO: 2131061 - DNA, 15 bp, Homo sapiens
acaaaattttctgag

SEQ ID NO: 2131062 - DNA, 15 bp, Homo sapiens
caaaattttctgaga

SEQ ID NO: 2131063 - DNA, 15 bp, Homo sapiens
aaaattttctgagat

SEQ ID NO: 2131064 - DNA, 15 bp, Homo sapiens
aaattttctgagatc

SEQ ID NO: 2131065 - DNA, 15 bp, Homo sapiens
aattttctgagatcc

SEQ ID NO: 2131066 - DNA, 15 bp, Homo sapiens
attttctgagatcct

SEQ ID NO: 2131067 - DNA, 15 bp, Homo sapiens
ttttctgagatccta

SEQ ID NO: 2131068 - DNA, 15 bp, Homo sapiens
tttctgagatcctaa

SEQ ID NO: 2131069 - DNA, 15 bp, Homo sapiens
ttctgagatcctaaa

SEQ ID NO: 2131070 - DNA, 15 bp, Homo sapiens
tctgagatcctaaaa

SEQ ID NO: 2131071 - DNA, 15 bp, Homo sapiens
ctgagatcctaaaaa

SEQ ID NO: 2131072 - DNA, 15 bp, Homo sapiens
tgagatcctaaaaaa

SEQ ID NO: 2131073 - DNA, 15 bp, Homo sapiens
gagatcctaaaaaaa

SEQ ID NO: 2131074 - DNA, 15 bp, Homo sapiens
agatcctaaaaaaat

SEQ ID NO: 2131075 - DNA, 15 bp, Homo sapiens
gatcctaaaaaaatg

SEQ ID NO: 2131076 - DNA, 15 bp, Homo sapiens
atcctaaaaaaatgt

SEQ ID NO: 2131077 - DNA, 15 bp, Homo sapiens
tcctaaaaaaatgtg

SEQ ID NO: 2131078 - DNA, 15 bp, Homo sapiens
cctaaaaaaatgtgt

SEQ ID NO: 2131079 - DNA, 15 bp, Homo sapiens
ctaaaaaaatgtgtt

SEQ ID NO: 2131080 - DNA, 15 bp, Homo sapiens
taaaaaaatgtgttt

SEQ ID NO: 2131081 - DNA, 15 bp, Homo sapiens
aaaaaaatgtgtttt

SEQ ID NO: 2131082 - DNA, 15 bp, Homo sapiens
aaaaaatgtgttttg

SEQ ID NO: 2131083 - DNA, 15 bp, Homo sapiens
aaaaatgtgttttga

SEQ ID NO: 2131084 - DNA, 15 bp, Homo sapiens
aaaatgtgttttgag

SEQ ID NO: 2131085 - DNA, 15 bp, Homo sapiens
aaatgtgttttgagg

SEQ ID NO: 2131086 - DNA, 15 bp, Homo sapiens
aatgtgttttgagga

SEQ ID NO: 2131087 - DNA, 15 bp, Homo sapiens
atgtgttttgaggaa

SEQ ID NO: 2131088 - DNA, 15 bp, Homo sapiens
tgtgttttgaggaac

SEQ ID NO: 2131089 - DNA, 15 bp, Homo sapiens
gtgttttgaggaaca

SEQ ID NO: 2131090 - DNA, 15 bp, Homo sapiens
tgttttgaggaacac

SEQ ID NO: 2131091 - DNA, 15 bp, Homo sapiens
gttttgaggaacact

SEQ ID NO: 2131092 - DNA, 15 bp, Homo sapiens
ttttgaggaacactg

SEQ ID NO: 2131093 - DNA, 15 bp, Homo sapiens
tttgaggaacactga

SEQ ID NO: 2131094 - DNA, 15 bp, Homo sapiens
ttgaggaacactgac

SEQ ID NO: 2131095 - DNA, 15 bp, Homo sapiens
tgaggaacactgact

SEQ ID NO: 2131096 - DNA, 15 bp, Homo sapiens
gaggaacactgactt

SEQ ID NO: 2131097 - DNA, 15 bp, Homo sapiens
aggaacactgactta

SEQ ID NO: 2131098 - DNA, 15 bp, Homo sapiens
ggaacactgacttaa

SEQ ID NO: 2131099 - DNA, 15 bp, Homo sapiens
gaacactgacttaac

SEQ ID NO: 2131100 - DNA, 15 bp, Homo sapiens
aacactgacttaaca

SEQ ID NO: 2131101 - DNA, 15 bp, Homo sapiens
acactgacttaacaa

SEQ ID NO: 2131102 - DNA, 15 bp, Homo sapiens
cactgacttaacaaa

SEQ ID NO: 2131103 - DNA, 15 bp, Homo sapiens
actgacttaacaaag

SEQ ID NO: 2131104 - DNA, 15 bp, Homo sapiens
ctgacttaacaaaga

SEQ ID NO: 2131105 - DNA, 15 bp, Homo sapiens
tgacttaacaaagat

SEQ ID NO: 2131106 - DNA, 15 bp, Homo sapiens
gacttaacaaagata

SEQ ID NO: 2131107 - DNA, 15 bp, Homo sapiens
acttaacaaagatat

SEQ ID NO: 2131108 - DNA, 15 bp, Homo sapiens
cttaacaaagatatt

SEQ ID NO: 2131109 - DNA, 15 bp, Homo sapiens
ttaacaaagatattt

SEQ ID NO: 2131110 - DNA, 15 bp, Homo sapiens
taacaaagatatttg

SEQ ID NO: 2131111 - DNA, 15 bp, Homo sapiens
aacaaagatatttga

SEQ ID NO: 2131112 - DNA, 15 bp, Homo sapiens
acaaagatatttgaa

SEQ ID NO: 2131113 - DNA, 15 bp, Homo sapiens
caaagatatttgaaa

SEQ ID NO: 2131114 - DNA, 15 bp, Homo sapiens
aaagatatttgaaat

SEQ ID NO: 2131115 - DNA, 15 bp, Homo sapiens
aagatatttgaaatg

SEQ ID NO: 2131116 - DNA, 15 bp, Homo sapiens
agatatttgaaatgt

SEQ ID NO: 2131117 - DNA, 15 bp, Homo sapiens
gatatttgaaatgta

SEQ ID NO: 2131118 - DNA, 15 bp, Homo sapiens
atatttgaaatgtaa

SEQ ID NO: 2131119 - DNA, 15 bp, Homo sapiens
tatttgaaatgtaaa

SEQ ID NO: 2131120 - DNA, 15 bp, Homo sapiens
atttgaaatgtaaat

SEQ ID NO: 2131121 - DNA, 15 bp, Homo sapiens
tttgaaatgtaaata

SEQ ID NO: 2131122 - DNA, 15 bp, Homo sapiens
ttgaaatgtaaatat

SEQ ID NO: 2131123 - DNA, 15 bp, Homo sapiens
tgaaatgtaaatatg

SEQ ID NO: 2131124 - DNA, 15 bp, Homo sapiens
gaaatgtaaatatgt

SEQ ID NO: 2131125 - DNA, 15 bp, Homo sapiens
aaatgtaaatatgtt

SEQ ID NO: 2131126 - DNA, 15 bp, Homo sapiens
aatgtaaatatgttt

SEQ ID NO: 2131127 - DNA, 15 bp, Homo sapiens
atgtaaatatgtttt

SEQ ID NO: 2131128 - DNA, 15 bp, Homo sapiens
tgtaaatatgttttc

SEQ ID NO: 2131129 - DNA, 15 bp, Homo sapiens
gtaaatatgttttcc

SEQ ID NO: 2131130 - DNA, 15 bp, Homo sapiens
taaatatgttttcca

SEQ ID NO: 2131131 - DNA, 15 bp, Homo sapiens
aaatatgttttccaa

SEQ ID NO: 2131132 - DNA, 15 bp, Homo sapiens
aatatgttttccaat

SEQ ID NO: 2131133 - DNA, 15 bp, Homo sapiens
atatgttttccaatt

SEQ ID NO: 2131134 - DNA, 15 bp, Homo sapiens
tatgttttccaattt

SEQ ID NO: 2131135 - DNA, 15 bp, Homo sapiens
atgttttccaatttc

SEQ ID NO: 2131136 - DNA, 15 bp, Homo sapiens
tgttttccaatttca

SEQ ID NO: 2131137 - DNA, 15 bp, Homo sapiens
gttttccaatttcac

SEQ ID NO: 2131138 - DNA, 15 bp, Homo sapiens
ttttccaatttcacg

SEQ ID NO: 2131139 - DNA, 15 bp, Homo sapiens
tttccaatttcacgt

SEQ ID NO: 2131140 - DNA, 15 bp, Homo sapiens
ttccaatttcacgtt

SEQ ID NO: 2131141 - DNA, 15 bp, Homo sapiens
tccaatttcacgttg

SEQ ID NO: 2131142 - DNA, 15 bp, Homo sapiens
ccaatttcacgttgt

SEQ ID NO: 2131143 - DNA, 15 bp, Homo sapiens
caatttcacgttgtc

SEQ ID NO: 2131144 - DNA, 15 bp, Homo sapiens
aatttcacgttgtct

SEQ ID NO: 2131145 - DNA, 15 bp, Homo sapiens
atttcacgttgtctt

SEQ ID NO: 2131146 - DNA, 15 bp, Homo sapiens
tttcacgttgtcttt

SEQ ID NO: 2131147 - DNA, 15 bp, Homo sapiens
ttcacgttgtctttg

SEQ ID NO: 2131148 - DNA, 15 bp, Homo sapiens
tcacgttgtctttgt

SEQ ID NO: 2131149 - DNA, 15 bp, Homo sapiens
cacgttgtctttgtc

SEQ ID NO: 2131150 - DNA, 15 bp, Homo sapiens
acgttgtctttgtca

SEQ ID NO: 2131151 - DNA, 15 bp, Homo sapiens
cgttgtctttgtcaa

SEQ ID NO: 2131152 - DNA, 15 bp, Homo sapiens
gttgtctttgtcaaa

SEQ ID NO: 2131153 - DNA, 15 bp, Homo sapiens
ttgtctttgtcaaag

SEQ ID NO: 2131154 - DNA, 15 bp, Homo sapiens
tgtctttgtcaaaga

SEQ ID NO: 2131155 - DNA, 15 bp, Homo sapiens
gtctttgtcaaagat

SEQ ID NO: 2131156 - DNA, 15 bp, Homo sapiens
tctttgtcaaagatg

SEQ ID NO: 2131157 - DNA, 15 bp, Homo sapiens
ctttgtcaaagatgt

SEQ ID NO: 2131158 - DNA, 15 bp, Homo sapiens
tttgtcaaagatgtg

SEQ ID NO: 2131159 - DNA, 15 bp, Homo sapiens
ttgtcaaagatgtgt

SEQ ID NO: 2131160 - DNA, 15 bp, Homo sapiens
tgtcaaagatgtgtt

SEQ ID NO: 2131161 - DNA, 15 bp, Homo sapiens
gtcaaagatgtgttt

SEQ ID NO: 2131162 - DNA, 15 bp, Homo sapiens
tcaaagatgtgtttt

SEQ ID NO: 2131163 - DNA, 15 bp, Homo sapiens
caaagatgtgtttta

SEQ ID NO: 2131164 - DNA, 15 bp, Homo sapiens
aaagatgtgttttat

SEQ ID NO: 2131165 - DNA, 15 bp, Homo sapiens
aagatgtgttttata

SEQ ID NO: 2131166 - DNA, 15 bp, Homo sapiens
agatgtgttttatat

SEQ ID NO: 2131167 - DNA, 15 bp, Homo sapiens
gatgtgttttatata

SEQ ID NO: 2131168 - DNA, 15 bp, Homo sapiens
atgtgttttatataa

SEQ ID NO: 2131169 - DNA, 15 bp, Homo sapiens
tgtgttttatataac

SEQ ID NO: 2131170 - DNA, 15 bp, Homo sapiens
gtgttttatataact

SEQ ID NO: 2131171 - DNA, 15 bp, Homo sapiens
tgttttatataactt

SEQ ID NO: 2131172 - DNA, 15 bp, Homo sapiens
gttttatataactta

SEQ ID NO: 2131173 - DNA, 15 bp, Homo sapiens
ttttatataacttat

SEQ ID NO: 2131174 - DNA, 15 bp, Homo sapiens
tttatataacttatg

SEQ ID NO: 2131175 - DNA, 15 bp, Homo sapiens
ttatataacttatgt

SEQ ID NO: 2131176 - DNA, 15 bp, Homo sapiens
tatataacttatgta

SEQ ID NO: 2131177 - DNA, 15 bp, Homo sapiens
atataacttatgtag

SEQ ID NO: 2131178 - DNA, 15 bp, Homo sapiens
tataacttatgtaga

SEQ ID NO: 2131179 - DNA, 15 bp, Homo sapiens
ataacttatgtagaa

SEQ ID NO: 2131180 - DNA, 15 bp, Homo sapiens
taacttatgtagaac

SEQ ID NO: 2131181 - DNA, 15 bp, Homo sapiens
aacttatgtagaact

SEQ ID NO: 2131182 - DNA, 15 bp, Homo sapiens
acttatgtagaactt

SEQ ID NO: 2131183 - DNA, 15 bp, Homo sapiens
cttatgtagaacttg

SEQ ID NO: 2131184 - DNA, 15 bp, Homo sapiens
ttatgtagaacttgg

SEQ ID NO: 2131185 - DNA, 15 bp, Homo sapiens
tatgtagaacttggg

SEQ ID NO: 2131186 - DNA, 15 bp, Homo sapiens
atgtagaacttgggg

SEQ ID NO: 2131187 - DNA, 15 bp, Homo sapiens
tgtagaacttgggga

SEQ ID NO: 2131188 - DNA, 15 bp, Homo sapiens
gtagaacttggggat

SEQ ID NO: 2131189 - DNA, 15 bp, Homo sapiens
tagaacttggggatc

SEQ ID NO: 2131190 - DNA, 15 bp, Homo sapiens
agaacttggggatcc

SEQ ID NO: 2131191 - DNA, 15 bp, Homo sapiens
gaacttggggatcca

SEQ ID NO: 2131192 - DNA, 15 bp, Homo sapiens
aacttggggatccat

SEQ ID NO: 2131193 - DNA, 15 bp, Homo sapiens
acttggggatccatt

SEQ ID NO: 2131194 - DNA, 15 bp, Homo sapiens
cttggggatccatta

SEQ ID NO: 2131195 - DNA, 15 bp, Homo sapiens
ttggggatccattag

SEQ ID NO: 2131196 - DNA, 15 bp, Homo sapiens
tggggatccattaga

SEQ ID NO: 2131197 - DNA, 15 bp, Homo sapiens
ggggatccattagaa

SEQ ID NO: 2131198 - DNA, 15 bp, Homo sapiens
gggatccattagaat

SEQ ID NO: 2131199 - DNA, 15 bp, Homo sapiens
ggatccattagaata

SEQ ID NO: 2131200 - DNA, 15 bp, Homo sapiens
gatccattagaatat

SEQ ID NO: 2131201 - DNA, 15 bp, Homo sapiens
atccattagaatata

SEQ ID NO: 2131202 - DNA, 15 bp, Homo sapiens
tccattagaatatat

SEQ ID NO: 2131203 - DNA, 15 bp, Homo sapiens
ccattagaatatatt

SEQ ID NO: 2131204 - DNA, 15 bp, Homo sapiens
cattagaatatattc

SEQ ID NO: 2131205 - DNA, 15 bp, Homo sapiens
attagaatatattca

SEQ ID NO: 2131206 - DNA, 15 bp, Homo sapiens
ttagaatatattcac

SEQ ID NO: 2131207 - DNA, 15 bp, Homo sapiens
tagaatatattcaca

SEQ ID NO: 2131208 - DNA, 15 bp, Homo sapiens
agaatatattcacaa

SEQ ID NO: 2131209 - DNA, 15 bp, Homo sapiens
gaatatattcacaaa

SEQ ID NO: 2131210 - DNA, 15 bp, Homo sapiens
aatatattcacaaat

SEQ ID NO: 2131211 - DNA, 15 bp, Homo sapiens
atatattcacaaatc

SEQ ID NO: 2131212 - DNA, 15 bp, Homo sapiens
tatattcacaaatcc

SEQ ID NO: 2131213 - DNA, 15 bp, Homo sapiens
atattcacaaatccc

SEQ ID NO: 2131214 - DNA, 15 bp, Homo sapiens
tattcacaaatcccc

SEQ ID NO: 2131215 - DNA, 15 bp, Homo sapiens
attcacaaatcccca

SEQ ID NO: 2131216 - DNA, 15 bp, Homo sapiens
ttcacaaatccccag

SEQ ID NO: 2131217 - DNA, 15 bp, Homo sapiens
tcacaaatccccagg

SEQ ID NO: 2131218 - DNA, 15 bp, Homo sapiens
cacaaatccccaggg

SEQ ID NO: 2131219 - DNA, 15 bp, Homo sapiens
acaaatccccagggt

SEQ ID NO: 2131220 - DNA, 15 bp, Homo sapiens
caaatccccagggtt

SEQ ID NO: 2131221 - DNA, 15 bp, Homo sapiens
aaatccccagggtta

SEQ ID NO: 2131222 - DNA, 15 bp, Homo sapiens
aatccccagggttat

SEQ ID NO: 2131223 - DNA, 15 bp, Homo sapiens
atccccagggttatc

SEQ ID NO: 2131224 - DNA, 15 bp, Homo sapiens
tccccagggttatca

SEQ ID NO: 2131225 - DNA, 15 bp, Homo sapiens
ccccagggttatcac

SEQ ID NO: 2131226 - DNA, 15 bp, Homo sapiens
cccagggttatcacc

SEQ ID NO: 2131227 - DNA, 15 bp, Homo sapiens
ccagggttatcaccc

SEQ ID NO: 2131228 - DNA, 15 bp, Homo sapiens
cagggttatcacccc

SEQ ID NO: 2131229 - DNA, 15 bp, Homo sapiens
agggttatcacccca

SEQ ID NO: 2131230 - DNA, 15 bp, Homo sapiens
gggttatcaccccaa

SEQ ID NO: 2131231 - DNA, 15 bp, Homo sapiens
ggttatcaccccaat

SEQ ID NO: 2131232 - DNA, 15 bp, Homo sapiens
gttatcaccccaatt

SEQ ID NO: 2131233 - DNA, 15 bp, Homo sapiens
ttatcaccccaattt

SEQ ID NO: 2131234 - DNA, 15 bp, Homo sapiens
tatcaccccaatttg

SEQ ID NO: 2131235 - DNA, 15 bp, Homo sapiens
atcaccccaatttga

SEQ ID NO: 2131236 - DNA, 15 bp, Homo sapiens
tcaccccaatttgag

SEQ ID NO: 2131237 - DNA, 15 bp, Homo sapiens
caccccaatttgaga

SEQ ID NO: 2131238 - DNA, 15 bp, Homo sapiens
accccaatttgagaa

SEQ ID NO: 2131239 - DNA, 15 bp, Homo sapiens
ccccaatttgagaaa

SEQ ID NO: 2131240 - DNA, 15 bp, Homo sapiens
cccaatttgagaaac

SEQ ID NO: 2131241 - DNA, 15 bp, Homo sapiens
ccaatttgagaaacc

SEQ ID NO: 2131242 - DNA, 15 bp, Homo sapiens
caatttgagaaaccc

SEQ ID NO: 2131243 - DNA, 15 bp, Homo sapiens
aatttgagaaaccct

SEQ ID NO: 2131244 - DNA, 15 bp, Homo sapiens
atttgagaaaccctg

SEQ ID NO: 2131245 - DNA, 15 bp, Homo sapiens
tttgagaaaccctgg

SEQ ID NO: 2131246 - DNA, 15 bp, Homo sapiens
ttgagaaaccctggt

SEQ ID NO: 2131247 - DNA, 15 bp, Homo sapiens
tgagaaaccctggtc

SEQ ID NO: 2131248 - DNA, 15 bp, Homo sapiens
gagaaaccctggtct

SEQ ID NO: 2131249 - DNA, 15 bp, Homo sapiens
agaaaccctggtcta

SEQ ID NO: 2131250 - DNA, 15 bp, Homo sapiens
gaaaccctggtctat

SEQ ID NO: 2131251 - DNA, 15 bp, Homo sapiens
aaaccctggtctatg

SEQ ID NO: 2131252 - DNA, 15 bp, Homo sapiens
aaccctggtctatgc

SEQ ID NO: 2131253 - DNA, 15 bp, Homo sapiens
accctggtctatgct

SEQ ID NO: 2131254 - DNA, 15 bp, Homo sapiens
ccctggtctatgctt

SEQ ID NO: 2131255 - DNA, 15 bp, Homo sapiens
cctggtctatgctta

SEQ ID NO: 2131256 - DNA, 15 bp, Homo sapiens
ctggtctatgcttat

SEQ ID NO: 2131257 - DNA, 15 bp, Homo sapiens
tggtctatgcttatg

SEQ ID NO: 2131258 - DNA, 15 bp, Homo sapiens
ggtctatgcttatga

SEQ ID NO: 2131259 - DNA, 15 bp, Homo sapiens
gtctatgcttatgaa

SEQ ID NO: 2131260 - DNA, 15 bp, Homo sapiens
tctatgcttatgaaa

SEQ ID NO: 2131261 - DNA, 15 bp, Homo sapiens
ctatgcttatgaaat

SEQ ID NO: 2131262 - DNA, 15 bp, Homo sapiens
tatgcttatgaaatc

SEQ ID NO: 2131263 - DNA, 15 bp, Homo sapiens
atgcttatgaaatct

SEQ ID NO: 2131264 - DNA, 15 bp, Homo sapiens
tgcttatgaaatctt

SEQ ID NO: 2131265 - DNA, 15 bp, Homo sapiens
gcttatgaaatcttc

SEQ ID NO: 2131266 - DNA, 15 bp, Homo sapiens
cttatgaaatcttct

SEQ ID NO: 2131267 - DNA, 15 bp, Homo sapiens
ttatgaaatcttcta

SEQ ID NO: 2131268 - DNA, 15 bp, Homo sapiens
tatgaaatcttctat

SEQ ID NO: 2131269 - DNA, 15 bp, Homo sapiens
atgaaatcttctatt

SEQ ID NO: 2131270 - DNA, 15 bp, Homo sapiens
tgaaatcttctattg

SEQ ID NO: 2131271 - DNA, 15 bp, Homo sapiens
gaaatcttctattgg

SEQ ID NO: 2131272 - DNA, 15 bp, Homo sapiens
aaatcttctattggt

SEQ ID NO: 2131273 - DNA, 15 bp, Homo sapiens
aatcttctattggta

SEQ ID NO: 2131274 - DNA, 15 bp, Homo sapiens
atcttctattggtaa

SEQ ID NO: 2131275 - DNA, 15 bp, Homo sapiens
tcttctattggtaat

SEQ ID NO: 2131276 - DNA, 15 bp, Homo sapiens
cttctattggtaatt

SEQ ID NO: 2131277 - DNA, 15 bp, Homo sapiens
ttctattggtaatta

SEQ ID NO: 2131278 - DNA, 15 bp, Homo sapiens
tctattggtaattaa

SEQ ID NO: 2131279 - DNA, 15 bp, Homo sapiens
ctattggtaattaaa

SEQ ID NO: 2131280 - DNA, 15 bp, Homo sapiens
tattggtaattaaat

SEQ ID NO: 2131281 - DNA, 15 bp, Homo sapiens
attggtaattaaatt

SEQ ID NO: 2131282 - DNA, 15 bp, Homo sapiens
ttggtaattaaattg

SEQ ID NO: 2131283 - DNA, 15 bp, Homo sapiens
tggtaattaaattgt

SEQ ID NO: 2131284 - DNA, 15 bp, Homo sapiens
ggtaattaaattgtc

SEQ ID NO: 2131285 - DNA, 15 bp, Homo sapiens
gtaattaaattgtca

SEQ ID NO: 2131286 - DNA, 15 bp, Homo sapiens
taattaaattgtcat

SEQ ID NO: 2131287 - DNA, 15 bp, Homo sapiens
aattaaattgtcatt

SEQ ID NO: 2131288 - DNA, 15 bp, Homo sapiens
attaaattgtcattc

SEQ ID NO: 2131289 - DNA, 15 bp, Homo sapiens
ttaaattgtcattca

SEQ ID NO: 2131290 - DNA, 15 bp, Homo sapiens
taaattgtcattcat

SEQ ID NO: 2131291 - DNA, 15 bp, Homo sapiens
aaattgtcattcatt

SEQ ID NO: 2131292 - DNA, 15 bp, Homo sapiens
aattgtcattcattg

SEQ ID NO: 2131293 - DNA, 15 bp, Homo sapiens
attgtcattcattgt

SEQ ID NO: 2131294 - DNA, 15 bp, Homo sapiens
ttgtcattcattgtc

SEQ ID NO: 2131295 - DNA, 15 bp, Homo sapiens
tgtcattcattgtca

SEQ ID NO: 2131296 - DNA, 15 bp, Homo sapiens
gtcattcattgtcaa

SEQ ID NO: 2131297 - DNA, 15 bp, Homo sapiens
tcattcattgtcaac

SEQ ID NO: 2131298 - DNA, 15 bp, Homo sapiens
cattcattgtcaaca

SEQ ID NO: 2131299 - DNA, 15 bp, Homo sapiens
attcattgtcaacat

SEQ ID NO: 2131300 - DNA, 15 bp, Homo sapiens
ttcattgtcaacata

SEQ ID NO: 2131301 - DNA, 15 bp, Homo sapiens
tcattgtcaacatac

SEQ ID NO: 2131302 - DNA, 15 bp, Homo sapiens
cattgtcaacataca

SEQ ID NO: 2131303 - DNA, 15 bp, Homo sapiens
attgtcaacatacaa

SEQ ID NO: 2131304 - DNA, 15 bp, Homo sapiens
ttgtcaacatacaat

SEQ ID NO: 2131305 - DNA, 15 bp, Homo sapiens
tgtcaacatacaatt

SEQ ID NO: 2131306 - DNA, 15 bp, Homo sapiens
gtcaacatacaatta

SEQ ID NO: 2131307 - DNA, 15 bp, Homo sapiens
tcaacatacaattat

SEQ ID NO: 2131308 - DNA, 15 bp, Homo sapiens
caacatacaattata

SEQ ID NO: 2131309 - DNA, 15 bp, Homo sapiens
aacatacaattataa

SEQ ID NO: 2131310 - DNA, 15 bp, Homo sapiens
acatacaattataat

SEQ ID NO: 2131311 - DNA, 15 bp, Homo sapiens
catacaattataatt

SEQ ID NO: 2131312 - DNA, 15 bp, Homo sapiens
atacaattataatta

SEQ ID NO: 2131313 - DNA, 15 bp, Homo sapiens
tacaattataattat

SEQ ID NO: 2131314 - DNA, 15 bp, Homo sapiens
acaattataattatt

SEQ ID NO: 2131315 - DNA, 15 bp, Homo sapiens
caattataattatta

SEQ ID NO: 2131316 - DNA, 15 bp, Homo sapiens
aattataattattat

SEQ ID NO: 2131317 - DNA, 15 bp, Homo sapiens
attataattattatt

SEQ ID NO: 2131318 - DNA, 15 bp, Homo sapiens
ttataattattattg

SEQ ID NO: 2131319 - DNA, 15 bp, Homo sapiens
tataattattattgg

SEQ ID NO: 2131320 - DNA, 15 bp, Homo sapiens
ataattattattgga

SEQ ID NO: 2131321 - DNA, 15 bp, Homo sapiens
taattattattggaa

SEQ ID NO: 2131322 - DNA, 15 bp, Homo sapiens
aattattattggaat

SEQ ID NO: 2131323 - DNA, 15 bp, Homo sapiens
attattattggaatt

SEQ ID NO: 2131324 - DNA, 15 bp, Homo sapiens
ttattattggaattt

SEQ ID NO: 2131325 - DNA, 15 bp, Homo sapiens
tattattggaatttg

SEQ ID NO: 2131326 - DNA, 15 bp, Homo sapiens
attattggaatttgt

SEQ ID NO: 2131327 - DNA, 15 bp, Homo sapiens
ttattggaatttgtt

SEQ ID NO: 2131328 - DNA, 15 bp, Homo sapiens
tattggaatttgttt

SEQ ID NO: 2131329 - DNA, 15 bp, Homo sapiens
attggaatttgtttt

SEQ ID NO: 2131330 - DNA, 15 bp, Homo sapiens
ttggaatttgtttta

SEQ ID NO: 2131331 - DNA, 15 bp, Homo sapiens
tggaatttgttttaa

SEQ ID NO: 2131332 - DNA, 15 bp, Homo sapiens
ggaatttgttttaaa

SEQ ID NO: 2131333 - DNA, 15 bp, Homo sapiens
gaatttgttttaaat

SEQ ID NO: 2131334 - DNA, 15 bp, Homo sapiens
aatttgttttaaatg

SEQ ID NO: 2131335 - DNA, 15 bp, Homo sapiens
atttgttttaaatga

SEQ ID NO: 2131336 - DNA, 15 bp, Homo sapiens
tttgttttaaatgaa

SEQ ID NO: 2131337 - DNA, 15 bp, Homo sapiens
ttgttttaaatgaat

SEQ ID NO: 2131338 - DNA, 15 bp, Homo sapiens
tgttttaaatgaatg

SEQ ID NO: 2131339 - DNA, 15 bp, Homo sapiens
gttttaaatgaatga

SEQ ID NO: 2131340 - DNA, 15 bp, Homo sapiens
ttttaaatgaatgaa

SEQ ID NO: 2131341 - DNA, 15 bp, Homo sapiens
tttaaatgaatgaat

SEQ ID NO: 2131342 - DNA, 15 bp, Homo sapiens
ttaaatgaatgaatt

SEQ ID NO: 2131343 - DNA, 15 bp, Homo sapiens
taaatgaatgaattt

SEQ ID NO: 2131344 - DNA, 15 bp, Homo sapiens
aaatgaatgaatttg

SEQ ID NO: 2131345 - DNA, 15 bp, Homo sapiens
aatgaatgaatttgg

SEQ ID NO: 2131346 - DNA, 15 bp, Homo sapiens
atgaatgaatttgga

SEQ ID NO: 2131347 - DNA, 15 bp, Homo sapiens
gaatgaatttggagg

SEQ ID NO: 2131348 - DNA, 15 bp, Homo sapiens
aatgaatttggaggt

SEQ ID NO: 2131349 - DNA, 15 bp, Homo sapiens
atgaatttggaggtg

SEQ ID NO: 2131350 - DNA, 15 bp, Homo sapiens
tgaatttggaggtga

SEQ ID NO: 2131351 - DNA, 15 bp, Homo sapiens
gaatttggaggtgat

SEQ ID NO: 2131352 - DNA, 15 bp, Homo sapiens
aatttggaggtgatt

SEQ ID NO: 2131353 - DNA, 15 bp, Homo sapiens
atttggaggtgattc

SEQ ID NO: 2131354 - DNA, 15 bp, Homo sapiens
tttggaggtgattct

SEQ ID NO: 2131355 - DNA, 15 bp, Homo sapiens
ttggaggtgattctg

SEQ ID NO: 2131356 - DNA, 15 bp, Homo sapiens
tggaggtgattctgt

SEQ ID NO: 2131357 - DNA, 15 bp, Homo sapiens
ggaggtgattctgta

SEQ ID NO: 2131358 - DNA, 15 bp, Homo sapiens
gaggtgattctgtac

SEQ ID NO: 2131359 - DNA, 15 bp, Homo sapiens
aggtgattctgtacc

SEQ ID NO: 2131360 - DNA, 15 bp, Homo sapiens
ggtgattctgtacct

SEQ ID NO: 2131361 - DNA, 15 bp, Homo sapiens
gtgattctgtacctt

SEQ ID NO: 2131362 - DNA, 15 bp, Homo sapiens
tgattctgtacctta

SEQ ID NO: 2131363 - DNA, 15 bp, Homo sapiens
gattctgtaccttaa

SEQ ID NO: 2131364 - DNA, 15 bp, Homo sapiens
attctgtaccttaag

SEQ ID NO: 2131365 - DNA, 15 bp, Homo sapiens
ttctgtaccttaagt

SEQ ID NO: 2131366 - DNA, 15 bp, Homo sapiens
tctgtaccttaagtc

SEQ ID NO: 2131367 - DNA, 15 bp, Homo sapiens
ctgtaccttaagtca

SEQ ID NO: 2131368 - DNA, 15 bp, Homo sapiens
tgtaccttaagtcaa

SEQ ID NO: 2131369 - DNA, 15 bp, Homo sapiens
gtaccttaagtcaag

SEQ ID NO: 2131370 - DNA, 15 bp, Homo sapiens
taccttaagtcaaga

SEQ ID NO: 2131371 - DNA, 15 bp, Homo sapiens
accttaagtcaagag

SEQ ID NO: 2131372 - DNA, 15 bp, Homo sapiens
ccttaagtcaagagg

SEQ ID NO: 2131373 - DNA, 15 bp, Homo sapiens
cttaagtcaagagga

SEQ ID NO: 2131374 - DNA, 15 bp, Homo sapiens
ttaagtcaagaggaa

SEQ ID NO: 2131375 - DNA, 15 bp, Homo sapiens
taagtcaagaggaag

SEQ ID NO: 2131376 - DNA, 15 bp, Homo sapiens
aagtcaagaggaagg

SEQ ID NO: 2131377 - DNA, 15 bp, Homo sapiens
agtcaagaggaagga

SEQ ID NO: 2131378 - DNA, 15 bp, Homo sapiens
gtcaagaggaaggat

SEQ ID NO: 2131379 - DNA, 15 bp, Homo sapiens
tcaagaggaaggatg

SEQ ID NO: 2131380 - DNA, 15 bp, Homo sapiens
caagaggaaggatgg

SEQ ID NO: 2131381 - DNA, 15 bp, Homo sapiens
aagaggaaggatggc

SEQ ID NO: 2131382 - DNA, 15 bp, Homo sapiens
agaggaaggatggct

SEQ ID NO: 2131383 - DNA, 15 bp, Homo sapiens
gaggaaggatggctt

SEQ ID NO: 2131384 - DNA, 15 bp, Homo sapiens
aggaaggatggcttg

SEQ ID NO: 2131385 - DNA, 15 bp, Homo sapiens
ggaaggatggcttga

SEQ ID NO: 2131386 - DNA, 15 bp, Homo sapiens
gaaggatggcttgat

SEQ ID NO: 2131387 - DNA, 15 bp, Homo sapiens
aaggatggcttgatt

SEQ ID NO: 2131388 - DNA, 15 bp, Homo sapiens
aggatggcttgattt

SEQ ID NO: 2131389 - DNA, 15 bp, Homo sapiens
ggatggcttgatttt

SEQ ID NO: 2131390 - DNA, 15 bp, Homo sapiens
gatggcttgatttta

SEQ ID NO: 2131391 - DNA, 15 bp, Homo sapiens
atggcttgattttag

SEQ ID NO: 2131392 - DNA, 15 bp, Homo sapiens
tggcttgattttagg

SEQ ID NO: 2131393 - DNA, 15 bp, Homo sapiens
ggcttgattttaggt

SEQ ID NO: 2131394 - DNA, 15 bp, Homo sapiens
gcttgattttaggtg

SEQ ID NO: 2131395 - DNA, 15 bp, Homo sapiens
cttgattttaggtgg

SEQ ID NO: 2131396 - DNA, 15 bp, Homo sapiens
ttgattttaggtgga

SEQ ID NO: 2131397 - DNA, 15 bp, Homo sapiens
tgattttaggtggat

SEQ ID NO: 2131398 - DNA, 15 bp, Homo sapiens
gattttaggtggatt

SEQ ID NO: 2131399 - DNA, 15 bp, Homo sapiens
attttaggtggattg

SEQ ID NO: 2131400 - DNA, 15 bp, Homo sapiens
ttttaggtggattga

SEQ ID NO: 2131401 - DNA, 15 bp, Homo sapiens
tttaggtggattgat

SEQ ID NO: 2131402 - DNA, 15 bp, Homo sapiens
ttaggtggattgatt

SEQ ID NO: 2131403 - DNA, 15 bp, Homo sapiens
taggtggattgatta

SEQ ID NO: 2131404 - DNA, 15 bp, Homo sapiens
aggtggattgattat

SEQ ID NO: 2131405 - DNA, 15 bp, Homo sapiens
ggtggattgattata

SEQ ID NO: 2131406 - DNA, 15 bp, Homo sapiens
gtggattgattatac

SEQ ID NO: 2131407 - DNA, 15 bp, Homo sapiens
tggattgattatact

SEQ ID NO: 2131408 - DNA, 15 bp, Homo sapiens
ggattgattatacta

SEQ ID NO: 2131409 - DNA, 15 bp, Homo sapiens
gattgattatactag

SEQ ID NO: 2131410 - DNA, 15 bp, Homo sapiens
attgattatactaga

SEQ ID NO: 2131411 - DNA, 15 bp, Homo sapiens
ttgattatactagat

SEQ ID NO: 2131412 - DNA, 15 bp, Homo sapiens
tgattatactagata

SEQ ID NO: 2131413 - DNA, 15 bp, Homo sapiens
gattatactagatag

SEQ ID NO: 2131414 - DNA, 15 bp, Homo sapiens
attatactagatagc

SEQ ID NO: 2131415 - DNA, 15 bp, Homo sapiens
ttatactagatagca

SEQ ID NO: 2131416 - DNA, 15 bp, Homo sapiens
tatactagatagcat

SEQ ID NO: 2131417 - DNA, 15 bp, Homo sapiens
atactagatagcatc

SEQ ID NO: 2131418 - DNA, 15 bp, Homo sapiens
tactagatagcatcc

SEQ ID NO: 2131419 - DNA, 15 bp, Homo sapiens
actagatagcatcca

SEQ ID NO: 2131420 - DNA, 15 bp, Homo sapiens
ctagatagcatccaa

SEQ ID NO: 2131421 - DNA, 15 bp, Homo sapiens
tagatagcatccaaa

SEQ ID NO: 2131422 - DNA, 15 bp, Homo sapiens
agatagcatccaaag

SEQ ID NO: 2131423 - DNA, 15 bp, Homo sapiens
gatagcatccaaagg

SEQ ID NO: 2131424 - DNA, 15 bp, Homo sapiens
atagcatccaaaggt

SEQ ID NO: 2131425 - DNA, 15 bp, Homo sapiens
tagcatccaaaggtg

SEQ ID NO: 2131426 - DNA, 15 bp, Homo sapiens
agcatccaaaggtga

SEQ ID NO: 2131427 - DNA, 15 bp, Homo sapiens
gcatccaaaggtgaa

SEQ ID NO: 2131428 - DNA, 15 bp, Homo sapiens
catccaaaggtgaat

SEQ ID NO: 2131429 - DNA, 15 bp, Homo sapiens
atccaaaggtgaatc

SEQ ID NO: 2131430 - DNA, 15 bp, Homo sapiens
tccaaaggtgaatct

SEQ ID NO: 2131431 - DNA, 15 bp, Homo sapiens
ccaaaggtgaatctt

SEQ ID NO: 2131432 - DNA, 15 bp, Homo sapiens
caaaggtgaatcttg

SEQ ID NO: 2131433 - DNA, 15 bp, Homo sapiens
aaaggtgaatcttga

SEQ ID NO: 2131434 - DNA, 15 bp, Homo sapiens
aaggtgaatcttgaa

SEQ ID NO: 2131435 - DNA, 15 bp, Homo sapiens
aggtgaatcttgaag

SEQ ID NO: 2131436 - DNA, 15 bp, Homo sapiens
ggtgaatcttgaagc

SEQ ID NO: 2131437 - DNA, 15 bp, Homo sapiens
gtgaatcttgaagct

SEQ ID NO: 2131438 - DNA, 15 bp, Homo sapiens
tgaatcttgaagctg

SEQ ID NO: 2131439 - DNA, 15 bp, Homo sapiens
gaatcttgaagctgt

SEQ ID NO: 2131440 - DNA, 15 bp, Homo sapiens
aatcttgaagctgta

SEQ ID NO: 2131441 - DNA, 15 bp, Homo sapiens
atcttgaagctgtat

SEQ ID NO: 2131442 - DNA, 15 bp, Homo sapiens
tcttgaagctgtatt

SEQ ID NO: 2131443 - DNA, 15 bp, Homo sapiens
cttgaagctgtattt

SEQ ID NO: 2131444 - DNA, 15 bp, Homo sapiens
ttgaagctgtattta

SEQ ID NO: 2131445 - DNA, 15 bp, Homo sapiens
tgaagctgtatttaa

SEQ ID NO: 2131446 - DNA, 15 bp, Homo sapiens
gaagctgtatttaaa

SEQ ID NO: 2131447 - DNA, 15 bp, Homo sapiens
aagctgtatttaaat

SEQ ID NO: 2131448 - DNA, 15 bp, Homo sapiens
agctgtatttaaatt

SEQ ID NO: 2131449 - DNA, 15 bp, Homo sapiens
gctgtatttaaattc

SEQ ID NO: 2131450 - DNA, 15 bp, Homo sapiens
ctgtatttaaattca

SEQ ID NO: 2131451 - DNA, 15 bp, Homo sapiens
tgtatttaaattcat

SEQ ID NO: 2131452 - DNA, 15 bp, Homo sapiens
gtatttaaattcatt

SEQ ID NO: 2131453 - DNA, 15 bp, Homo sapiens
tatttaaattcattg

SEQ ID NO: 2131454 - DNA, 15 bp, Homo sapiens
atttaaattcattgc

SEQ ID NO: 2131455 - DNA, 15 bp, Homo sapiens
tttaaattcattgct

SEQ ID NO: 2131456 - DNA, 15 bp, Homo sapiens
ttaaattcattgctt

SEQ ID NO: 2131457 - DNA, 15 bp, Homo sapiens
taaattcattgcttg

SEQ ID NO: 2131458 - DNA, 15 bp, Homo sapiens
aaattcattgcttga

SEQ ID NO: 2131459 - DNA, 15 bp, Homo sapiens
aattcattgcttgaa

SEQ ID NO: 2131460 - DNA, 15 bp, Homo sapiens
attcattgcttgaaa

SEQ ID NO: 2131461 - DNA, 15 bp, Homo sapiens
ttcattgcttgaaat

SEQ ID NO: 2131462 - DNA, 15 bp, Homo sapiens
tcattgcttgaaata

SEQ ID NO: 2131463 - DNA, 15 bp, Homo sapiens
cattgcttgaaataa

SEQ ID NO: 2131464 - DNA, 15 bp, Homo sapiens
attgcttgaaataat

SEQ ID NO: 2131465 - DNA, 15 bp, Homo sapiens
ttgcttgaaataatt

SEQ ID NO: 2131466 - DNA, 15 bp, Homo sapiens
tgcttgaaataattt

SEQ ID NO: 2131467 - DNA, 15 bp, Homo sapiens
gcttgaaataatttc

SEQ ID NO: 2131468 - DNA, 15 bp, Homo sapiens
cttgaaataatttcc

SEQ ID NO: 2131469 - DNA, 15 bp, Homo sapiens
ttgaaataatttcca

SEQ ID NO: 2131470 - DNA, 15 bp, Homo sapiens
tgaaataatttccac

SEQ ID NO: 2131471 - DNA, 15 bp, Homo sapiens
gaaataatttccacc

SEQ ID NO: 2131472 - DNA, 15 bp, Homo sapiens
aaataatttccaccc

SEQ ID NO: 2131473 - DNA, 15 bp, Homo sapiens
aataatttccaccct

SEQ ID NO: 2131474 - DNA, 15 bp, Homo sapiens
ataatttccaccctt

SEQ ID NO: 2131475 - DNA, 15 bp, Homo sapiens
taatttccaccctta

SEQ ID NO: 2131476 - DNA, 15 bp, Homo sapiens
aatttccacccttaa

SEQ ID NO: 2131477 - DNA, 15 bp, Homo sapiens
atttccacccttaag

SEQ ID NO: 2131478 - DNA, 15 bp, Homo sapiens
tttccacccttaaga

SEQ ID NO: 2131479 - DNA, 15 bp, Homo sapiens
ttccacccttaagaa

SEQ ID NO: 2131480 - DNA, 15 bp, Homo sapiens
tccacccttaagaaa

SEQ ID NO: 2131481 - DNA, 15 bp, Homo sapiens
ccacccttaagaaaa

SEQ ID NO: 2131482 - DNA, 15 bp, Homo sapiens
cacccttaagaaaaa

SEQ ID NO: 2131483 - DNA, 15 bp, Homo sapiens
acccttaagaaaaat

SEQ ID NO: 2131484 - DNA, 15 bp, Homo sapiens
cccttaagaaaaatc

SEQ ID NO: 2131485 - DNA, 15 bp, Homo sapiens
ccttaagaaaaatct

SEQ ID NO: 2131486 - DNA, 15 bp, Homo sapiens
cttaagaaaaatctc

SEQ ID NO: 2131487 - DNA, 15 bp, Homo sapiens
ttaagaaaaatctct

SEQ ID NO: 2131488 - DNA, 15 bp, Homo sapiens
taagaaaaatctcta

SEQ ID NO: 2131489 - DNA, 15 bp, Homo sapiens
aagaaaaatctctag

SEQ ID NO: 2131490 - DNA, 15 bp, Homo sapiens
agaaaaatctctagc

SEQ ID NO: 2131491 - DNA, 15 bp, Homo sapiens
gaaaaatctctagca

SEQ ID NO: 2131492 - DNA, 15 bp, Homo sapiens
aaaaatctctagcaa

SEQ ID NO: 2131493 - DNA, 15 bp, Homo sapiens
aaaatctctagcaat

SEQ ID NO: 2131494 - DNA, 15 bp, Homo sapiens
aaatctctagcaatt

SEQ ID NO: 2131495 - DNA, 15 bp, Homo sapiens
aatctctagcaattg

SEQ ID NO: 2131496 - DNA, 15 bp, Homo sapiens
atctctagcaattgt

SEQ ID NO: 2131497 - DNA, 15 bp, Homo sapiens
tctctagcaattgta

SEQ ID NO: 2131498 - DNA, 15 bp, Homo sapiens
ctctagcaattgtaa

SEQ ID NO: 2131499 - DNA, 15 bp, Homo sapiens
tctagcaattgtaaa

SEQ ID NO: 2131500 - DNA, 15 bp, Homo sapiens
ctagcaattgtaaaa

SEQ ID NO: 2131501 - DNA, 15 bp, Homo sapiens
tagcaattgtaaaaa

SEQ ID NO: 2131502 - DNA, 15 bp, Homo sapiens
agcaattgtaaaaag

SEQ ID NO: 2131503 - DNA, 15 bp, Homo sapiens
gcaattgtaaaaagg

SEQ ID NO: 2131504 - DNA, 15 bp, Homo sapiens
caattgtaaaaaggg

SEQ ID NO: 2131505 - DNA, 15 bp, Homo sapiens
aattgtaaaaaggga

SEQ ID NO: 2131506 - DNA, 15 bp, Homo sapiens
attgtaaaaagggat

SEQ ID NO: 2131507 - DNA, 15 bp, Homo sapiens
ttgtaaaaagggatg

SEQ ID NO: 2131508 - DNA, 15 bp, Homo sapiens
tgtaaaaagggatgc

SEQ ID NO: 2131509 - DNA, 15 bp, Homo sapiens
gtaaaaagggatgct

SEQ ID NO: 2131510 - DNA, 15 bp, Homo sapiens
taaaaagggatgctc

SEQ ID NO: 2131511 - DNA, 15 bp, Homo sapiens
aaaaagggatgctct

SEQ ID NO: 2131512 - DNA, 15 bp, Homo sapiens
aaaagggatgctctg

SEQ ID NO: 2131513 - DNA, 15 bp, Homo sapiens
aaagggatgctctgg

SEQ ID NO: 2131514 - DNA, 15 bp, Homo sapiens
aagggatgctctgga

SEQ ID NO: 2131515 - DNA, 15 bp, Homo sapiens
agggatgctctggaa

SEQ ID NO: 2131516 - DNA, 15 bp, Homo sapiens
gggatgctctggaaa

SEQ ID NO: 2131517 - DNA, 15 bp, Homo sapiens
ggatgctctggaaat

SEQ ID NO: 2131518 - DNA, 15 bp, Homo sapiens
gatgctctggaaatg

SEQ ID NO: 2131519 - DNA, 15 bp, Homo sapiens
atgctctggaaatgt

SEQ ID NO: 2131520 - DNA, 15 bp, Homo sapiens
tgctctggaaatgtg

SEQ ID NO: 2131521 - DNA, 15 bp, Homo sapiens
gctctggaaatgtgg

SEQ ID NO: 2131522 - DNA, 15 bp, Homo sapiens
ctctggaaatgtggg

SEQ ID NO: 2131523 - DNA, 15 bp, Homo sapiens
tctggaaatgtgggc

SEQ ID NO: 2131524 - DNA, 15 bp, Homo sapiens
ctggaaatgtgggca

SEQ ID NO: 2131525 - DNA, 15 bp, Homo sapiens
tggaaatgtgggcat

SEQ ID NO: 2131526 - DNA, 15 bp, Homo sapiens
ggaaatgtgggcatc

SEQ ID NO: 2131527 - DNA, 15 bp, Homo sapiens
gaaatgtgggcatct

SEQ ID NO: 2131528 - DNA, 15 bp, Homo sapiens
aaatgtgggcatctt

SEQ ID NO: 2131529 - DNA, 15 bp, Homo sapiens
aatgtgggcatcttc

SEQ ID NO: 2131530 - DNA, 15 bp, Homo sapiens
atgtgggcatcttca

SEQ ID NO: 2131531 - DNA, 15 bp, Homo sapiens
tgtgggcatcttcaa

SEQ ID NO: 2131532 - DNA, 15 bp, Homo sapiens
gtgggcatcttcaaa

SEQ ID NO: 2131533 - DNA, 15 bp, Homo sapiens
tgggcatcttcaaaa

SEQ ID NO: 2131534 - DNA, 15 bp, Homo sapiens
gggcatcttcaaaat

SEQ ID NO: 2131535 - DNA, 15 bp, Homo sapiens
ggcatcttcaaaata

SEQ ID NO: 2131536 - DNA, 15 bp, Homo sapiens
gcatcttcaaaatag

SEQ ID NO: 2131537 - DNA, 15 bp, Homo sapiens
catcttcaaaataga

SEQ ID NO: 2131538 - DNA, 15 bp, Homo sapiens
atcttcaaaatagag

SEQ ID NO: 2131539 - DNA, 15 bp, Homo sapiens
tcttcaaaatagaga

SEQ ID NO: 2131540 - DNA, 15 bp, Homo sapiens
cttcaaaatagagat

SEQ ID NO: 2131541 - DNA, 15 bp, Homo sapiens
ttcaaaatagagata

SEQ ID NO: 2131542 - DNA, 15 bp, Homo sapiens
tcaaaatagagataa

SEQ ID NO: 2131543 - DNA, 15 bp, Homo sapiens
caaaatagagataat

SEQ ID NO: 2131544 - DNA, 15 bp, Homo sapiens
aaaatagagataatt

SEQ ID NO: 2131545 - DNA, 15 bp, Homo sapiens
aaatagagataattc

SEQ ID NO: 2131546 - DNA, 15 bp, Homo sapiens
aatagagataattct

SEQ ID NO: 2131547 - DNA, 15 bp, Homo sapiens
atagagataattctt

SEQ ID NO: 2131548 - DNA, 15 bp, Homo sapiens
tagagataattcttg

SEQ ID NO: 2131549 - DNA, 15 bp, Homo sapiens
agagataattcttgt

SEQ ID NO: 2131550 - DNA, 15 bp, Homo sapiens
gagataattcttgtg

SEQ ID NO: 2131551 - DNA, 15 bp, Homo sapiens
agataattcttgtgt

SEQ ID NO: 2131552 - DNA, 15 bp, Homo sapiens
gataattcttgtgtt

SEQ ID NO: 2131553 - DNA, 15 bp, Homo sapiens
ataattcttgtgtta

SEQ ID NO: 2131554 - DNA, 15 bp, Homo sapiens
taattcttgtgttag

SEQ ID NO: 2131555 - DNA, 15 bp, Homo sapiens
aattcttgtgttagt

SEQ ID NO: 2131556 - DNA, 15 bp, Homo sapiens
attcttgtgttagtt

SEQ ID NO: 2131557 - DNA, 15 bp, Homo sapiens
ttcttgtgttagttc

SEQ ID NO: 2131558 - DNA, 15 bp, Homo sapiens
tcttgtgttagttca

SEQ ID NO: 2131559 - DNA, 15 bp, Homo sapiens
cttgtgttagttcaa

SEQ ID NO: 2131560 - DNA, 15 bp, Homo sapiens
ttgtgttagttcaac

SEQ ID NO: 2131561 - DNA, 15 bp, Homo sapiens
tgtgttagttcaaca

SEQ ID NO: 2131562 - DNA, 15 bp, Homo sapiens
gtgttagttcaacaa

SEQ ID NO: 2131563 - DNA, 15 bp, Homo sapiens
tgttagttcaacaaa

SEQ ID NO: 2131564 - DNA, 15 bp, Homo sapiens
gttagttcaacaaat

SEQ ID NO: 2131565 - DNA, 15 bp, Homo sapiens
ttagttcaacaaata

SEQ ID NO: 2131566 - DNA, 15 bp, Homo sapiens
tagttcaacaaatat

SEQ ID NO: 2131567 - DNA, 15 bp, Homo sapiens
agttcaacaaatatt

SEQ ID NO: 2131568 - DNA, 15 bp, Homo sapiens
gttcaacaaatatta

SEQ ID NO: 2131569 - DNA, 15 bp, Homo sapiens
ttcaacaaatattat

SEQ ID NO: 2131570 - DNA, 15 bp, Homo sapiens
tcaacaaatattatt

SEQ ID NO: 2131571 - DNA, 15 bp, Homo sapiens
caacaaatattattg

SEQ ID NO: 2131572 - DNA, 15 bp, Homo sapiens
aacaaatattattgt

SEQ ID NO: 2131573 - DNA, 15 bp, Homo sapiens
acaaatattattgta

SEQ ID NO: 2131574 - DNA, 15 bp, Homo sapiens
caaatattattgtac

SEQ ID NO: 2131575 - DNA, 15 bp, Homo sapiens
aaatattattgtacc

SEQ ID NO: 2131576 - DNA, 15 bp, Homo sapiens
aatattattgtacca

SEQ ID NO: 2131577 - DNA, 15 bp, Homo sapiens
atattattgtaccag

SEQ ID NO: 2131578 - DNA, 15 bp, Homo sapiens
tattattgtaccagg

SEQ ID NO: 2131579 - DNA, 15 bp, Homo sapiens
attattgtaccaggt

SEQ ID NO: 2131580 - DNA, 15 bp, Homo sapiens
ttattgtaccaggtg

SEQ ID NO: 2131581 - DNA, 15 bp, Homo sapiens
tattgtaccaggtgc

SEQ ID NO: 2131582 - DNA, 15 bp, Homo sapiens
attgtaccaggtgct

SEQ ID NO: 2131583 - DNA, 15 bp, Homo sapiens
ttgtaccaggtgctg

SEQ ID NO: 2131584 - DNA, 15 bp, Homo sapiens
tgtaccaggtgctgg

SEQ ID NO: 2131585 - DNA, 15 bp, Homo sapiens
gtaccaggtgctgga

SEQ ID NO: 2131586 - DNA, 15 bp, Homo sapiens
taccaggtgctggaa

SEQ ID NO: 2131587 - DNA, 15 bp, Homo sapiens
accaggtgctggaat

SEQ ID NO: 2131588 - DNA, 15 bp, Homo sapiens
ccaggtgctggaata

SEQ ID NO: 2131589 - DNA, 15 bp, Homo sapiens
caggtgctggaataa

SEQ ID NO: 2131590 - DNA, 15 bp, Homo sapiens
aggtgctggaataaa

SEQ ID NO: 2131591 - DNA, 15 bp, Homo sapiens
ggtgctggaataaat

SEQ ID NO: 2131592 - DNA, 15 bp, Homo sapiens
gtgctggaataaata

SEQ ID NO: 2131593 - DNA, 15 bp, Homo sapiens
tgctggaataaatag

SEQ ID NO: 2131594 - DNA, 15 bp, Homo sapiens
gctggaataaatagc

SEQ ID NO: 2131595 - DNA, 15 bp, Homo sapiens
ctggaataaatagca

SEQ ID NO: 2131596 - DNA, 15 bp, Homo sapiens
tggaataaatagcaa

SEQ ID NO: 2131597 - DNA, 15 bp, Homo sapiens
ggaataaatagcaaa

SEQ ID NO: 2131598 - DNA, 15 bp, Homo sapiens
gaataaatagcaaaa

SEQ ID NO: 2131599 - DNA, 15 bp, Homo sapiens
aataaatagcaaaac

SEQ ID NO: 2131600 - DNA, 15 bp, Homo sapiens
ataaatagcaaaacc

SEQ ID NO: 2131601 - DNA, 15 bp, Homo sapiens
taaatagcaaaacca

SEQ ID NO: 2131602 - DNA, 15 bp, Homo sapiens
aaatagcaaaaccaa

SEQ ID NO: 2131603 - DNA, 15 bp, Homo sapiens
aatagcaaaaccaaa

SEQ ID NO: 2131604 - DNA, 15 bp, Homo sapiens
atagcaaaaccaaag

SEQ ID NO: 2131605 - DNA, 15 bp, Homo sapiens
tagcaaaaccaaaga

SEQ ID NO: 2131606 - DNA, 15 bp, Homo sapiens
agcaaaaccaaagac

SEQ ID NO: 2131607 - DNA, 15 bp, Homo sapiens
gcaaaaccaaagaca

SEQ ID NO: 2131608 - DNA, 15 bp, Homo sapiens
caaaaccaaagacag

SEQ ID NO: 2131609 - DNA, 15 bp, Homo sapiens
aaaaccaaagacagg

SEQ ID NO: 2131610 - DNA, 15 bp, Homo sapiens
aaaccaaagacagga

SEQ ID NO: 2131611 - DNA, 15 bp, Homo sapiens
aaccaaagacaggat

SEQ ID NO: 2131612 - DNA, 15 bp, Homo sapiens
accaaagacaggatt

SEQ ID NO: 2131613 - DNA, 15 bp, Homo sapiens
ccaaagacaggattt

SEQ ID NO: 2131614 - DNA, 15 bp, Homo sapiens
caaagacaggattta

SEQ ID NO: 2131615 - DNA, 15 bp, Homo sapiens
aaagacaggatttat

SEQ ID NO: 2131616 - DNA, 15 bp, Homo sapiens
aagacaggatttata

SEQ ID NO: 2131617 - DNA, 15 bp, Homo sapiens
agacaggatttatat

SEQ ID NO: 2131618 - DNA, 15 bp, Homo sapiens
gacaggatttatatc

SEQ ID NO: 2131619 - DNA, 15 bp, Homo sapiens
acaggatttatatca

SEQ ID NO: 2131620 - DNA, 15 bp, Homo sapiens
caggatttatatcaa

SEQ ID NO: 2131621 - DNA, 15 bp, Homo sapiens
aggatttatatcaag

SEQ ID NO: 2131622 - DNA, 15 bp, Homo sapiens
ggatttatatcaagg

SEQ ID NO: 2131623 - DNA, 15 bp, Homo sapiens
gatttatatcaagga

SEQ ID NO: 2131624 - DNA, 15 bp, Homo sapiens
atttatatcaaggaa

SEQ ID NO: 2131625 - DNA, 15 bp, Homo sapiens
tttatatcaaggaat

SEQ ID NO: 2131626 - DNA, 15 bp, Homo sapiens
ttatatcaaggaatt

SEQ ID NO: 2131627 - DNA, 15 bp, Homo sapiens
tatatcaaggaattt

SEQ ID NO: 2131628 - DNA, 15 bp, Homo sapiens
atatcaaggaatttg

SEQ ID NO: 2131629 - DNA, 15 bp, Homo sapiens
tatcaaggaatttgc

SEQ ID NO: 2131630 - DNA, 15 bp, Homo sapiens
atcaaggaatttgct

SEQ ID NO: 2131631 - DNA, 15 bp, Homo sapiens
tcaaggaatttgctt

SEQ ID NO: 2131632 - DNA, 15 bp, Homo sapiens
caaggaatttgcttt

SEQ ID NO: 2131633 - DNA, 15 bp, Homo sapiens
aaggaatttgctttc

SEQ ID NO: 2131634 - DNA, 15 bp, Homo sapiens
ggaatttgctttctt

SEQ ID NO: 2131635 - DNA, 15 bp, Homo sapiens
gaatttgctttctta

SEQ ID NO: 2131636 - DNA, 15 bp, Homo sapiens
aatttgctttcttat

SEQ ID NO: 2131637 - DNA, 15 bp, Homo sapiens
atttgctttcttatg

SEQ ID NO: 2131638 - DNA, 15 bp, Homo sapiens
tttgctttcttatgg

SEQ ID NO: 2131639 - DNA, 15 bp, Homo sapiens
ttgctttcttatgga

SEQ ID NO: 2131640 - DNA, 15 bp, Homo sapiens
tgctttcttatggag

SEQ ID NO: 2131641 - DNA, 15 bp, Homo sapiens
gctttcttatggagg

SEQ ID NO: 2131642 - DNA, 15 bp, Homo sapiens
ctttcttatggagga

SEQ ID NO: 2131643 - DNA, 15 bp, Homo sapiens
tttcttatggaggat

SEQ ID NO: 2131644 - DNA, 15 bp, Homo sapiens
ttcttatggaggatg

SEQ ID NO: 2131645 - DNA, 15 bp, Homo sapiens
tcttatggaggatgc

SEQ ID NO: 2131646 - DNA, 15 bp, Homo sapiens
cttatggaggatgca

SEQ ID NO: 2131647 - DNA, 15 bp, Homo sapiens
ttatggaggatgcag

SEQ ID NO: 2131648 - DNA, 15 bp, Homo sapiens
tatggaggatgcaga

SEQ ID NO: 2131649 - DNA, 15 bp, Homo sapiens
atggaggatgcagaa

SEQ ID NO: 2131650 - DNA, 15 bp, Homo sapiens
tggaggatgcagaag

SEQ ID NO: 2131651 - DNA, 15 bp, Homo sapiens
ggaggatgcagaagg

SEQ ID NO: 2131652 - DNA, 15 bp, Homo sapiens
gaggatgcagaagga

SEQ ID NO: 2131653 - DNA, 15 bp, Homo sapiens
aggatgcagaaggaa

SEQ ID NO: 2131654 - DNA, 15 bp, Homo sapiens
ggatgcagaaggaaa

SEQ ID NO: 2131655 - DNA, 15 bp, Homo sapiens
gatgcagaaggaaat

SEQ ID NO: 2131656 - DNA, 15 bp, Homo sapiens
atgcagaaggaaatc

SEQ ID NO: 2131657 - DNA, 15 bp, Homo sapiens
tgcagaaggaaatca

SEQ ID NO: 2131658 - DNA, 15 bp, Homo sapiens
gcagaaggaaatcat

SEQ ID NO: 2131659 - DNA, 15 bp, Homo sapiens
cagaaggaaatcatt

SEQ ID NO: 2131660 - DNA, 15 bp, Homo sapiens
agaaggaaatcatta

SEQ ID NO: 2131661 - DNA, 15 bp, Homo sapiens
gaaggaaatcattat

SEQ ID NO: 2131662 - DNA, 15 bp, Homo sapiens
aggaaatcattatgg

SEQ ID NO: 2131663 - DNA, 15 bp, Homo sapiens
ggaaatcattatggt

SEQ ID NO: 2131664 - DNA, 15 bp, Homo sapiens
gaaatcattatggtt

SEQ ID NO: 2131665 - DNA, 15 bp, Homo sapiens
aaatcattatggttt

SEQ ID NO: 2131666 - DNA, 15 bp, Homo sapiens
aatcattatggtttt

SEQ ID NO: 2131667 - DNA, 15 bp, Homo sapiens
atcattatggttttg

SEQ ID NO: 2131668 - DNA, 15 bp, Homo sapiens
tcattatggttttgg

SEQ ID NO: 2131669 - DNA, 15 bp, Homo sapiens
cattatggttttggg

SEQ ID NO: 2131670 - DNA, 15 bp, Homo sapiens
attatggttttgggc

SEQ ID NO: 2131671 - DNA, 15 bp, Homo sapiens
ttatggttttgggca

SEQ ID NO: 2131672 - DNA, 15 bp, Homo sapiens
tatggttttgggcag

SEQ ID NO: 2131673 - DNA, 15 bp, Homo sapiens
atggttttgggcaga

SEQ ID NO: 2131674 - DNA, 15 bp, Homo sapiens
tggttttgggcagaa

SEQ ID NO: 2131675 - DNA, 15 bp, Homo sapiens
ggttttgggcagaaa

SEQ ID NO: 2131676 - DNA, 15 bp, Homo sapiens
gttttgggcagaaat

SEQ ID NO: 2131677 - DNA, 15 bp, Homo sapiens
ttttgggcagaaatg

SEQ ID NO: 2131678 - DNA, 15 bp, Homo sapiens
tttgggcagaaatgc

SEQ ID NO: 2131679 - DNA, 15 bp, Homo sapiens
ttgggcagaaatgct

SEQ ID NO: 2131680 - DNA, 15 bp, Homo sapiens
tgggcagaaatgctt

SEQ ID NO: 2131681 - DNA, 15 bp, Homo sapiens
gggcagaaatgctta

SEQ ID NO: 2131682 - DNA, 15 bp, Homo sapiens
ggcagaaatgcttag

SEQ ID NO: 2131683 - DNA, 15 bp, Homo sapiens
gcagaaatgcttaga

SEQ ID NO: 2131684 - DNA, 15 bp, Homo sapiens
cagaaatgcttagac

SEQ ID NO: 2131685 - DNA, 15 bp, Homo sapiens
agaaatgcttagact

SEQ ID NO: 2131686 - DNA, 15 bp, Homo sapiens
gaaatgcttagactt

SEQ ID NO: 2131687 - DNA, 15 bp, Homo sapiens
aaatgcttagacttt

SEQ ID NO: 2131688 - DNA, 15 bp, Homo sapiens
aatgcttagacttta

SEQ ID NO: 2131689 - DNA, 15 bp, Homo sapiens
atgcttagactttag

SEQ ID NO: 2131690 - DNA, 15 bp, Homo sapiens
tgcttagactttagt

SEQ ID NO: 2131691 - DNA, 15 bp, Homo sapiens
gcttagactttagtc

SEQ ID NO: 2131692 - DNA, 15 bp, Homo sapiens
cttagactttagtcc

SEQ ID NO: 2131693 - DNA, 15 bp, Homo sapiens
ttagactttagtcct

SEQ ID NO: 2131694 - DNA, 15 bp, Homo sapiens
tagactttagtcctg

SEQ ID NO: 2131695 - DNA, 15 bp, Homo sapiens
agactttagtcctgg

SEQ ID NO: 2131696 - DNA, 15 bp, Homo sapiens
gactttagtcctggc

SEQ ID NO: 2131697 - DNA, 15 bp, Homo sapiens
actttagtcctggct

SEQ ID NO: 2131698 - DNA, 15 bp, Homo sapiens
ctttagtcctggctc

SEQ ID NO: 2131699 - DNA, 15 bp, Homo sapiens
tttagtcctggctct

SEQ ID NO: 2131700 - DNA, 15 bp, Homo sapiens
ttagtcctggctctg

SEQ ID NO: 2131701 - DNA, 15 bp, Homo sapiens
tagtcctggctctga

SEQ ID NO: 2131702 - DNA, 15 bp, Homo sapiens
agtcctggctctgag

SEQ ID NO: 2131703 - DNA, 15 bp, Homo sapiens
gtcctggctctgagt

SEQ ID NO: 2131704 - DNA, 15 bp, Homo sapiens
tcctggctctgagtt

SEQ ID NO: 2131705 - DNA, 15 bp, Homo sapiens
cctggctctgagttt

SEQ ID NO: 2131706 - DNA, 15 bp, Homo sapiens
ctggctctgagtttg

SEQ ID NO: 2131707 - DNA, 15 bp, Homo sapiens
tggctctgagtttgg

SEQ ID NO: 2131708 - DNA, 15 bp, Homo sapiens
ggctctgagtttggt

SEQ ID NO: 2131709 - DNA, 15 bp, Homo sapiens
gctctgagtttggtt

SEQ ID NO: 2131710 - DNA, 15 bp, Homo sapiens
ctctgagtttggttc

SEQ ID NO: 2131711 - DNA, 15 bp, Homo sapiens
tctgagtttggttca

SEQ ID NO: 2131712 - DNA, 15 bp, Homo sapiens
ctgagtttggttcag

SEQ ID NO: 2131713 - DNA, 15 bp, Homo sapiens
tgagtttggttcaga

SEQ ID NO: 2131714 - DNA, 15 bp, Homo sapiens
gagtttggttcagat

SEQ ID NO: 2131715 - DNA, 15 bp, Homo sapiens
agtttggttcagatc

SEQ ID NO: 2131716 - DNA, 15 bp, Homo sapiens
gtttggttcagatca

SEQ ID NO: 2131717 - DNA, 15 bp, Homo sapiens
tttggttcagatcac

SEQ ID NO: 2131718 - DNA, 15 bp, Homo sapiens
ttggttcagatcacc

SEQ ID NO: 2131719 - DNA, 15 bp, Homo sapiens
tggttcagatcacca

SEQ ID NO: 2131720 - DNA, 15 bp, Homo sapiens
ggttcagatcaccat

SEQ ID NO: 2131721 - DNA, 15 bp, Homo sapiens
gttcagatcaccatc

SEQ ID NO: 2131722 - DNA, 15 bp, Homo sapiens
ttcagatcaccatca

SEQ ID NO: 2131723 - DNA, 15 bp, Homo sapiens
tcagatcaccatcaa

SEQ ID NO: 2131724 - DNA, 15 bp, Homo sapiens
cagatcaccatcaat

SEQ ID NO: 2131725 - DNA, 15 bp, Homo sapiens
agatcaccatcaatc

SEQ ID NO: 2131726 - DNA, 15 bp, Homo sapiens
gatcaccatcaatct

SEQ ID NO: 2131727 - DNA, 15 bp, Homo sapiens
atcaccatcaatctg

SEQ ID NO: 2131728 - DNA, 15 bp, Homo sapiens
tcaccatcaatctga

SEQ ID NO: 2131729 - DNA, 15 bp, Homo sapiens
caccatcaatctgac

SEQ ID NO: 2131730 - DNA, 15 bp, Homo sapiens
accatcaatctgacc

SEQ ID NO: 2131731 - DNA, 15 bp, Homo sapiens
ccatcaatctgacca

SEQ ID NO: 2131732 - DNA, 15 bp, Homo sapiens
catcaatctgaccat

SEQ ID NO: 2131733 - DNA, 15 bp, Homo sapiens
atcaatctgaccatc

SEQ ID NO: 2131734 - DNA, 15 bp, Homo sapiens
tcaatctgaccatct

SEQ ID NO: 2131735 - DNA, 15 bp, Homo sapiens
caatctgaccatctc

SEQ ID NO: 2131736 - DNA, 15 bp, Homo sapiens
aatctgaccatctcg

SEQ ID NO: 2131737 - DNA, 15 bp, Homo sapiens
atctgaccatctcga

SEQ ID NO: 2131738 - DNA, 15 bp, Homo sapiens
tctgaccatctcgag

SEQ ID NO: 2131739 - DNA, 15 bp, Homo sapiens
ctgaccatctcgaga

SEQ ID NO: 2131740 - DNA, 15 bp, Homo sapiens
tgaccatctcgagac

SEQ ID NO: 2131741 - DNA, 15 bp, Homo sapiens
gaccatctcgagact

SEQ ID NO: 2131742 - DNA, 15 bp, Homo sapiens
accatctcgagactg

SEQ ID NO: 2131743 - DNA, 15 bp, Homo sapiens
ccatctcgagactgc

SEQ ID NO: 2131744 - DNA, 15 bp, Homo sapiens
catctcgagactgct

SEQ ID NO: 2131745 - DNA, 15 bp, Homo sapiens
atctcgagactgcta

SEQ ID NO: 2131746 - DNA, 15 bp, Homo sapiens
tctcgagactgctag

SEQ ID NO: 2131747 - DNA, 15 bp, Homo sapiens
ctcgagactgctagt

SEQ ID NO: 2131748 - DNA, 15 bp, Homo sapiens
tcgagactgctagtg

SEQ ID NO: 2131749 - DNA, 15 bp, Homo sapiens
cgagactgctagtga

SEQ ID NO: 2131750 - DNA, 15 bp, Homo sapiens
gagactgctagtgaa

SEQ ID NO: 2131751 - DNA, 15 bp, Homo sapiens
agactgctagtgaaa

SEQ ID NO: 2131752 - DNA, 15 bp, Homo sapiens
gactgctagtgaaat

SEQ ID NO: 2131753 - DNA, 15 bp, Homo sapiens
actgctagtgaaata

SEQ ID NO: 2131754 - DNA, 15 bp, Homo sapiens
ctgctagtgaaataa

SEQ ID NO: 2131755 - DNA, 15 bp, Homo sapiens
tgctagtgaaataag

SEQ ID NO: 2131756 - DNA, 15 bp, Homo sapiens
gctagtgaaataaga

SEQ ID NO: 2131757 - DNA, 15 bp, Homo sapiens
ctagtgaaataagat

SEQ ID NO: 2131758 - DNA, 15 bp, Homo sapiens
tagtgaaataagata

SEQ ID NO: 2131759 - DNA, 15 bp, Homo sapiens
agtgaaataagatag

SEQ ID NO: 2131760 - DNA, 15 bp, Homo sapiens
gtgaaataagatagg

SEQ ID NO: 2131761 - DNA, 15 bp, Homo sapiens
tgaaataagataggg

SEQ ID NO: 2131762 - DNA, 15 bp, Homo sapiens
gaaataagatagggg

SEQ ID NO: 2131763 - DNA, 15 bp, Homo sapiens
aaataagataggggc

SEQ ID NO: 2131764 - DNA, 15 bp, Homo sapiens
aataagataggggct

SEQ ID NO: 2131765 - DNA, 15 bp, Homo sapiens
ataagataggggctt

SEQ ID NO: 2131766 - DNA, 15 bp, Homo sapiens
taagataggggctta

SEQ ID NO: 2131767 - DNA, 15 bp, Homo sapiens
aagataggggcttat

SEQ ID NO: 2131768 - DNA, 15 bp, Homo sapiens
agataggggcttata

SEQ ID NO: 2131769 - DNA, 15 bp, Homo sapiens
gataggggcttatat

SEQ ID NO: 2131770 - DNA, 15 bp, Homo sapiens
ataggggcttatatc

SEQ ID NO: 2131771 - DNA, 15 bp, Homo sapiens
taggggcttatatca

SEQ ID NO: 2131772 - DNA, 15 bp, Homo sapiens
aggggcttatatcaa

SEQ ID NO: 2131773 - DNA, 15 bp, Homo sapiens
ggggcttatatcaaa

SEQ ID NO: 2131774 - DNA, 15 bp, Homo sapiens
gggcttatatcaaat

SEQ ID NO: 2131775 - DNA, 15 bp, Homo sapiens
ggcttatatcaaata

SEQ ID NO: 2131776 - DNA, 15 bp, Homo sapiens
gcttatatcaaatac

SEQ ID NO: 2131777 - DNA, 15 bp, Homo sapiens
cttatatcaaatacc

SEQ ID NO: 2131778 - DNA, 15 bp, Homo sapiens
ttatatcaaatacct

SEQ ID NO: 2131779 - DNA, 15 bp, Homo sapiens
tatatcaaataccta

SEQ ID NO: 2131780 - DNA, 15 bp, Homo sapiens
atatcaaatacctaa

SEQ ID NO: 2131781 - DNA, 15 bp, Homo sapiens
tatcaaatacctaaa

SEQ ID NO: 2131782 - DNA, 15 bp, Homo sapiens
atcaaatacctaaat

SEQ ID NO: 2131783 - DNA, 15 bp, Homo sapiens
tcaaatacctaaatc

SEQ ID NO: 2131784 - DNA, 15 bp, Homo sapiens
caaatacctaaatcc

SEQ ID NO: 2131785 - DNA, 15 bp, Homo sapiens
aaatacctaaatccc

SEQ ID NO: 2131786 - DNA, 15 bp, Homo sapiens
aatacctaaatccct

SEQ ID NO: 2131787 - DNA, 15 bp, Homo sapiens
atacctaaatccctg

SEQ ID NO: 2131788 - DNA, 15 bp, Homo sapiens
tacctaaatccctga

SEQ ID NO: 2131789 - DNA, 15 bp, Homo sapiens
acctaaatccctgaa

SEQ ID NO: 2131790 - DNA, 15 bp, Homo sapiens
cctaaatccctgaaa

SEQ ID NO: 2131791 - DNA, 15 bp, Homo sapiens
ctaaatccctgaaaa

SEQ ID NO: 2131792 - DNA, 15 bp, Homo sapiens
taaatccctgaaaat

SEQ ID NO: 2131793 - DNA, 15 bp, Homo sapiens
aaatccctgaaaatg

SEQ ID NO: 2131794 - DNA, 15 bp, Homo sapiens
aatccctgaaaatga

SEQ ID NO: 2131795 - DNA, 15 bp, Homo sapiens
atccctgaaaatgac

SEQ ID NO: 2131796 - DNA, 15 bp, Homo sapiens
tccctgaaaatgaca

SEQ ID NO: 2131797 - DNA, 15 bp, Homo sapiens
ccctgaaaatgacat

SEQ ID NO: 2131798 - DNA, 15 bp, Homo sapiens
cctgaaaatgacatt

SEQ ID NO: 2131799 - DNA, 15 bp, Homo sapiens
ctgaaaatgacattt

SEQ ID NO: 2131800 - DNA, 15 bp, Homo sapiens
tgaaaatgacatttt

SEQ ID NO: 2131801 - DNA, 15 bp, Homo sapiens
gaaaatgacattttg

SEQ ID NO: 2131802 - DNA, 15 bp, Homo sapiens
aaaatgacattttgt

SEQ ID NO: 2131803 - DNA, 15 bp, Homo sapiens
aaatgacattttgtg

SEQ ID NO: 2131804 - DNA, 15 bp, Homo sapiens
aatgacattttgtga

SEQ ID NO: 2131805 - DNA, 15 bp, Homo sapiens
atgacattttgtgat

SEQ ID NO: 2131806 - DNA, 15 bp, Homo sapiens
tgacattttgtgatt

SEQ ID NO: 2131807 - DNA, 15 bp, Homo sapiens
gacattttgtgattt

SEQ ID NO: 2131808 - DNA, 15 bp, Homo sapiens
acattttgtgatttg

SEQ ID NO: 2131809 - DNA, 15 bp, Homo sapiens
cattttgtgatttgg

SEQ ID NO: 2131810 - DNA, 15 bp, Homo sapiens
attttgtgatttgga

SEQ ID NO: 2131811 - DNA, 15 bp, Homo sapiens
ttttgtgatttggaa

SEQ ID NO: 2131812 - DNA, 15 bp, Homo sapiens
tttgtgatttggaaa

SEQ ID NO: 2131813 - DNA, 15 bp, Homo sapiens
ttgtgatttggaaaa

SEQ ID NO: 2131814 - DNA, 15 bp, Homo sapiens
tgtgatttggaaaat

SEQ ID NO: 2131815 - DNA, 15 bp, Homo sapiens
gtgatttggaaaatt

SEQ ID NO: 2131816 - DNA, 15 bp, Homo sapiens
tgatttggaaaattt

SEQ ID NO: 2131817 - DNA, 15 bp, Homo sapiens
gatttggaaaatttt

SEQ ID NO: 2131818 - DNA, 15 bp, Homo sapiens
atttggaaaattttc

SEQ ID NO: 2131819 - DNA, 15 bp, Homo sapiens
tttggaaaattttca

SEQ ID NO: 2131820 - DNA, 15 bp, Homo sapiens
ttggaaaattttcaa

SEQ ID NO: 2131821 - DNA, 15 bp, Homo sapiens
tggaaaattttcaaa

SEQ ID NO: 2131822 - DNA, 15 bp, Homo sapiens
ggaaaattttcaaaa

SEQ ID NO: 2131823 - DNA, 15 bp, Homo sapiens
gaaaattttcaaaag

SEQ ID NO: 2131824 - DNA, 15 bp, Homo sapiens
aaaattttcaaaagt

SEQ ID NO: 2131825 - DNA, 15 bp, Homo sapiens
aaattttcaaaagtc

SEQ ID NO: 2131826 - DNA, 15 bp, Homo sapiens
aattttcaaaagtct

SEQ ID NO: 2131827 - DNA, 15 bp, Homo sapiens
attttcaaaagtcta

SEQ ID NO: 2131828 - DNA, 15 bp, Homo sapiens
ttttcaaaagtctaa

SEQ ID NO: 2131829 - DNA, 15 bp, Homo sapiens
tttcaaaagtctaat

SEQ ID NO: 2131830 - DNA, 15 bp, Homo sapiens
ttcaaaagtctaatg

SEQ ID NO: 2131831 - DNA, 15 bp, Homo sapiens
tcaaaagtctaatga

SEQ ID NO: 2131832 - DNA, 15 bp, Homo sapiens
caaaagtctaatgaa

SEQ ID NO: 2131833 - DNA, 15 bp, Homo sapiens
aaaagtctaatgaag

SEQ ID NO: 2131834 - DNA, 15 bp, Homo sapiens
aaagtctaatgaagg

SEQ ID NO: 2131835 - DNA, 15 bp, Homo sapiens
aagtctaatgaagga

SEQ ID NO: 2131836 - DNA, 15 bp, Homo sapiens
agtctaatgaaggaa

SEQ ID NO: 2131837 - DNA, 15 bp, Homo sapiens
gtctaatgaaggaaa

SEQ ID NO: 2131838 - DNA, 15 bp, Homo sapiens
tctaatgaaggaaac

SEQ ID NO: 2131839 - DNA, 15 bp, Homo sapiens
ctaatgaaggaaact

SEQ ID NO: 2131840 - DNA, 15 bp, Homo sapiens
taatgaaggaaactt

SEQ ID NO: 2131841 - DNA, 15 bp, Homo sapiens
aatgaaggaaacttt

SEQ ID NO: 2131842 - DNA, 15 bp, Homo sapiens
atgaaggaaactttt

SEQ ID NO: 2131843 - DNA, 15 bp, Homo sapiens
tgaaggaaacttttt

SEQ ID NO: 2131844 - DNA, 15 bp, Homo sapiens
gaaggaaactttttt

SEQ ID NO: 2131845 - DNA, 15 bp, Homo sapiens
aaggaaacttttttg

SEQ ID NO: 2131846 - DNA, 15 bp, Homo sapiens
aggaaacttttttgg

SEQ ID NO: 2131847 - DNA, 15 bp, Homo sapiens
ggaaacttttttggc

SEQ ID NO: 2131848 - DNA, 15 bp, Homo sapiens
gaaacttttttggca

SEQ ID NO: 2131849 - DNA, 15 bp, Homo sapiens
aaacttttttggcat

SEQ ID NO: 2131850 - DNA, 15 bp, Homo sapiens
aacttttttggcatt

SEQ ID NO: 2131851 - DNA, 15 bp, Homo sapiens
acttttttggcattt

SEQ ID NO: 2131852 - DNA, 15 bp, Homo sapiens
cttttttggcatttc

SEQ ID NO: 2131853 - DNA, 15 bp, Homo sapiens
ttttttggcatttct

SEQ ID NO: 2131854 - DNA, 15 bp, Homo sapiens
tttttggcatttctt

SEQ ID NO: 2131855 - DNA, 15 bp, Homo sapiens
ttttggcatttcttt

SEQ ID NO: 2131856 - DNA, 15 bp, Homo sapiens
tttggcatttcttta

SEQ ID NO: 2131857 - DNA, 15 bp, Homo sapiens
ttggcatttctttaa

SEQ ID NO: 2131858 - DNA, 15 bp, Homo sapiens
tggcatttctttaaa

SEQ ID NO: 2131859 - DNA, 15 bp, Homo sapiens
ggcatttctttaaat

SEQ ID NO: 2131860 - DNA, 15 bp, Homo sapiens
gcatttctttaaatg

SEQ ID NO: 2131861 - DNA, 15 bp, Homo sapiens
catttctttaaatga

SEQ ID NO: 2131862 - DNA, 15 bp, Homo sapiens
atttctttaaatgat

SEQ ID NO: 2131863 - DNA, 15 bp, Homo sapiens
tttctttaaatgatt

SEQ ID NO: 2131864 - DNA, 15 bp, Homo sapiens
ttctttaaatgatta

SEQ ID NO: 2131865 - DNA, 15 bp, Homo sapiens
tctttaaatgattat

SEQ ID NO: 2131866 - DNA, 15 bp, Homo sapiens
ctttaaatgattatt

SEQ ID NO: 2131867 - DNA, 15 bp, Homo sapiens
tttaaatgattattg

SEQ ID NO: 2131868 - DNA, 15 bp, Homo sapiens
ttaaatgattattgt

SEQ ID NO: 2131869 - DNA, 15 bp, Homo sapiens
taaatgattattgtc

SEQ ID NO: 2131870 - DNA, 15 bp, Homo sapiens
aaatgattattgtca

SEQ ID NO: 2131871 - DNA, 15 bp, Homo sapiens
aatgattattgtcat

SEQ ID NO: 2131872 - DNA, 15 bp, Homo sapiens
tttttgtgttccagg

SEQ ID NO: 2131873 - DNA, 15 bp, Homo sapiens
ttttgtgttccagga

SEQ ID NO: 2131874 - DNA, 15 bp, Homo sapiens
tttgtgttccaggat

SEQ ID NO: 2131875 - DNA, 15 bp, Homo sapiens
ttgtgttccaggatc

SEQ ID NO: 2131876 - DNA, 15 bp, Homo sapiens
tgtgttccaggatcc

SEQ ID NO: 2131877 - DNA, 15 bp, Homo sapiens
gtgttccaggatccc

SEQ ID NO: 2131878 - DNA, 15 bp, Homo sapiens
tgttccaggatccca

SEQ ID NO: 2131879 - DNA, 15 bp, Homo sapiens
gttccaggatcccat

SEQ ID NO: 2131880 - DNA, 15 bp, Homo sapiens
ttccaggatcccatt

SEQ ID NO: 2131881 - DNA, 15 bp, Homo sapiens
tccaggatcccattg

SEQ ID NO: 2131882 - DNA, 15 bp, Homo sapiens
ccaggatcccattga

SEQ ID NO: 2131883 - DNA, 15 bp, Homo sapiens
caggatcccattgaa

SEQ ID NO: 2131884 - DNA, 15 bp, Homo sapiens
aggatcccattgaag

SEQ ID NO: 2131885 - DNA, 15 bp, Homo sapiens
ggatcccattgaaga

SEQ ID NO: 2131886 - DNA, 15 bp, Homo sapiens
gatcccattgaagat

SEQ ID NO: 2131887 - DNA, 15 bp, Homo sapiens
atcccattgaagata

SEQ ID NO: 2131888 - DNA, 15 bp, Homo sapiens
tcccattgaagatac

SEQ ID NO: 2131889 - DNA, 15 bp, Homo sapiens
cccattgaagatacc

SEQ ID NO: 2131890 - DNA, 15 bp, Homo sapiens
ccattgaagatacca

SEQ ID NO: 2131891 - DNA, 15 bp, Homo sapiens
cattgaagataccac

SEQ ID NO: 2131892 - DNA, 15 bp, Homo sapiens
attgaagataccacg

SEQ ID NO: 2131893 - DNA, 15 bp, Homo sapiens
ttgaagataccacgc

SEQ ID NO: 2131894 - DNA, 15 bp, Homo sapiens
tgaagataccacgct

SEQ ID NO: 2131895 - DNA, 15 bp, Homo sapiens
gaagataccacgctg

SEQ ID NO: 2131896 - DNA, 15 bp, Homo sapiens
aagataccacgctgc

SEQ ID NO: 2131897 - DNA, 15 bp, Homo sapiens
agataccacgctgca

SEQ ID NO: 2131898 - DNA, 15 bp, Homo sapiens
gataccacgctgcat

SEQ ID NO: 2131899 - DNA, 15 bp, Homo sapiens
ataccacgctgcatg

SEQ ID NO: 2131900 - DNA, 15 bp, Homo sapiens
taccacgctgcatgt

SEQ ID NO: 2131901 - DNA, 15 bp, Homo sapiens
accacgctgcatgtg

SEQ ID NO: 2131902 - DNA, 15 bp, Homo sapiens
ccacgctgcatgtgt

SEQ ID NO: 2131903 - DNA, 15 bp, Homo sapiens
cacgctgcatgtgtc

SEQ ID NO: 2131904 - DNA, 15 bp, Homo sapiens
acgctgcatgtgtcc

SEQ ID NO: 2131905 - DNA, 15 bp, Homo sapiens
cgctgcatgtgtcct

SEQ ID NO: 2131906 - DNA, 15 bp, Homo sapiens
gctgcatgtgtcctt

SEQ ID NO: 2131907 - DNA, 15 bp, Homo sapiens
ctgcatgtgtcctta

SEQ ID NO: 2131908 - DNA, 15 bp, Homo sapiens
tgcatgtgtccttag

SEQ ID NO: 2131909 - DNA, 15 bp, Homo sapiens
gcatgtgtccttagt

SEQ ID NO: 2131910 - DNA, 15 bp, Homo sapiens
catgtgtccttagta

SEQ ID NO: 2131911 - DNA, 15 bp, Homo sapiens
atgtgtccttagtag

SEQ ID NO: 2131912 - DNA, 15 bp, Homo sapiens
tgtgtccttagtagt

SEQ ID NO: 2131913 - DNA, 15 bp, Homo sapiens
gtgtccttagtagtc

SEQ ID NO: 2131914 - DNA, 15 bp, Homo sapiens
tgtccttagtagtca

SEQ ID NO: 2131915 - DNA, 15 bp, Homo sapiens
gtccttagtagtcat

SEQ ID NO: 2131916 - DNA, 15 bp, Homo sapiens
tccttagtagtcatg

SEQ ID NO: 2131917 - DNA, 15 bp, Homo sapiens
ccttagtagtcatgt

SEQ ID NO: 2131918 - DNA, 15 bp, Homo sapiens
cttagtagtcatgtc

SEQ ID NO: 2131919 - DNA, 15 bp, Homo sapiens
ttagtagtcatgtct

SEQ ID NO: 2131920 - DNA, 15 bp, Homo sapiens
tagtagtcatgtctc

SEQ ID NO: 2131921 - DNA, 15 bp, Homo sapiens
agtagtcatgtctcc

SEQ ID NO: 2131922 - DNA, 15 bp, Homo sapiens
gtagtcatgtctcct

SEQ ID NO: 2131923 - DNA, 15 bp, Homo sapiens
tagtcatgtctcctt

SEQ ID NO: 2131924 - DNA, 15 bp, Homo sapiens
agtcatgtctcctta

SEQ ID NO: 2131925 - DNA, 15 bp, Homo sapiens
gtcatgtctccttag

SEQ ID NO: 2131926 - DNA, 15 bp, Homo sapiens
tcatgtctccttagg

SEQ ID NO: 2131927 - DNA, 15 bp, Homo sapiens
catgtctccttaggc

SEQ ID NO: 2131928 - DNA, 15 bp, Homo sapiens
atgtctccttaggct

SEQ ID NO: 2131929 - DNA, 15 bp, Homo sapiens
tgtctccttaggctc

SEQ ID NO: 2131930 - DNA, 15 bp, Homo sapiens
gtctccttaggctcc

SEQ ID NO: 2131931 - DNA, 15 bp, Homo sapiens
tctccttaggctcct

SEQ ID NO: 2131932 - DNA, 15 bp, Homo sapiens
ctccttaggctcctc

SEQ ID NO: 2131933 - DNA, 15 bp, Homo sapiens
tccttaggctcctct

SEQ ID NO: 2131934 - DNA, 15 bp, Homo sapiens
ccttaggctcctctt

SEQ ID NO: 2131935 - DNA, 15 bp, Homo sapiens
cttaggctcctcttg

SEQ ID NO: 2131936 - DNA, 15 bp, Homo sapiens
ttaggctcctcttgg

SEQ ID NO: 2131937 - DNA, 15 bp, Homo sapiens
taggctcctcttggt

SEQ ID NO: 2131938 - DNA, 15 bp, Homo sapiens
aggctcctcttggta

SEQ ID NO: 2131939 - DNA, 15 bp, Homo sapiens
ggctcctcttggtaa

SEQ ID NO: 2131940 - DNA, 15 bp, Homo sapiens
gctcctcttggtaat

SEQ ID NO: 2131941 - DNA, 15 bp, Homo sapiens
ctcctcttggtaatg

SEQ ID NO: 2131942 - DNA, 15 bp, Homo sapiens
tcctcttggtaatga

SEQ ID NO: 2131943 - DNA, 15 bp, Homo sapiens
cctcttggtaatgac

SEQ ID NO: 2131944 - DNA, 15 bp, Homo sapiens
ctcttggtaatgaca

SEQ ID NO: 2131945 - DNA, 15 bp, Homo sapiens
tcttggtaatgacag

SEQ ID NO: 2131946 - DNA, 15 bp, Homo sapiens
cttggtaatgacagt

SEQ ID NO: 2131947 - DNA, 15 bp, Homo sapiens
ttggtaatgacagtt

SEQ ID NO: 2131948 - DNA, 15 bp, Homo sapiens
tggtaatgacagttt

SEQ ID NO: 2131949 - DNA, 15 bp, Homo sapiens
ggtaatgacagtttc

SEQ ID NO: 2131950 - DNA, 15 bp, Homo sapiens
gtaatgacagtttct

SEQ ID NO: 2131951 - DNA, 15 bp, Homo sapiens
taatgacagtttctc

SEQ ID NO: 2131952 - DNA, 15 bp, Homo sapiens
aatgacagtttctca

SEQ ID NO: 2131953 - DNA, 15 bp, Homo sapiens
atgacagtttctcag

SEQ ID NO: 2131954 - DNA, 15 bp, Homo sapiens
tgacagtttctcaga

SEQ ID NO: 2131955 - DNA, 15 bp, Homo sapiens
gacagtttctcagac

SEQ ID NO: 2131956 - DNA, 15 bp, Homo sapiens
acagtttctcagact

SEQ ID NO: 2131957 - DNA, 15 bp, Homo sapiens
cagtttctcagactc

SEQ ID NO: 2131958 - DNA, 15 bp, Homo sapiens
agtttctcagactct

SEQ ID NO: 2131959 - DNA, 15 bp, Homo sapiens
gtttctcagactctt

SEQ ID NO: 2131960 - DNA, 15 bp, Homo sapiens
ttctcagactctttg

SEQ ID NO: 2131961 - DNA, 15 bp, Homo sapiens
tctcagactctttgt

SEQ ID NO: 2131962 - DNA, 15 bp, Homo sapiens
ctcagactctttgtt

SEQ ID NO: 2131963 - DNA, 15 bp, Homo sapiens
tcagactctttgttt

SEQ ID NO: 2131964 - DNA, 15 bp, Homo sapiens
cagactctttgtttt

SEQ ID NO: 2131965 - DNA, 15 bp, Homo sapiens
agactctttgttttt

SEQ ID NO: 2131966 - DNA, 15 bp, Homo sapiens
gactctttgtttttg

SEQ ID NO: 2131967 - DNA, 15 bp, Homo sapiens
actctttgtttttga

SEQ ID NO: 2131968 - DNA, 15 bp, Homo sapiens
ctctttgtttttgat

SEQ ID NO: 2131969 - DNA, 15 bp, Homo sapiens
tctttgtttttgatg

SEQ ID NO: 2131970 - DNA, 15 bp, Homo sapiens
ctttgtttttgatga

SEQ ID NO: 2131971 - DNA, 15 bp, Homo sapiens
tttgtttttgatgaa

SEQ ID NO: 2131972 - DNA, 15 bp, Homo sapiens
ttgtttttgatgaac

SEQ ID NO: 2131973 - DNA, 15 bp, Homo sapiens
tgtttttgatgaact

SEQ ID NO: 2131974 - DNA, 15 bp, Homo sapiens
gtttttgatgaactt

SEQ ID NO: 2131975 - DNA, 15 bp, Homo sapiens
tttttgatgaacttc

SEQ ID NO: 2131976 - DNA, 15 bp, Homo sapiens
ttttgatgaacttca

SEQ ID NO: 2131977 - DNA, 15 bp, Homo sapiens
tttgatgaacttcac

SEQ ID NO: 2131978 - DNA, 15 bp, Homo sapiens
ttgatgaacttcaca

SEQ ID NO: 2131979 - DNA, 15 bp, Homo sapiens
tgatgaacttcacag

SEQ ID NO: 2131980 - DNA, 15 bp, Homo sapiens
gatgaacttcacagt

SEQ ID NO: 2131981 - DNA, 15 bp, Homo sapiens
atgaacttcacagtt

SEQ ID NO: 2131982 - DNA, 15 bp, Homo sapiens
tgaacttcacagttt

SEQ ID NO: 2131983 - DNA, 15 bp, Homo sapiens
gaacttcacagtttt

SEQ ID NO: 2131984 - DNA, 15 bp, Homo sapiens
aacttcacagttttg

SEQ ID NO: 2131985 - DNA, 15 bp, Homo sapiens
acttcacagttttga

SEQ ID NO: 2131986 - DNA, 15 bp, Homo sapiens
cttcacagttttgag

SEQ ID NO: 2131987 - DNA, 15 bp, Homo sapiens
ttcacagttttgagg

SEQ ID NO: 2131988 - DNA, 15 bp, Homo sapiens
tcacagttttgagga

SEQ ID NO: 2131989 - DNA, 15 bp, Homo sapiens
cacagttttgaggac

SEQ ID NO: 2131990 - DNA, 15 bp, Homo sapiens
acagttttgaggact

SEQ ID NO: 2131991 - DNA, 15 bp, Homo sapiens
cagttttgaggacta

SEQ ID NO: 2131992 - DNA, 15 bp, Homo sapiens
agttttgaggactaa

SEQ ID NO: 2131993 - DNA, 15 bp, Homo sapiens
gttttgaggactaat

SEQ ID NO: 2131994 - DNA, 15 bp, Homo sapiens
ttttgaggactaatg

SEQ ID NO: 2131995 - DNA, 15 bp, Homo sapiens
tttgaggactaatgg

SEQ ID NO: 2131996 - DNA, 15 bp, Homo sapiens
ttgaggactaatggt

SEQ ID NO: 2131997 - DNA, 15 bp, Homo sapiens
tgaggactaatggtc

SEQ ID NO: 2131998 - DNA, 15 bp, Homo sapiens
gaggactaatggtcc

SEQ ID NO: 2131999 - DNA, 15 bp, Homo sapiens
aggactaatggtcca

SEQ ID NO: 2132000 - DNA, 15 bp, Homo sapiens
ggactaatggtccag

SEQ ID NO: 2132001 - DNA, 15 bp, Homo sapiens
gactaatggtccagt

SEQ ID NO: 2132002 - DNA, 15 bp, Homo sapiens
actaatggtccagta

SEQ ID NO: 2132003 - DNA, 15 bp, Homo sapiens
ctaatggtccagtat

SEQ ID NO: 2132004 - DNA, 15 bp, Homo sapiens
taatggtccagtatt

SEQ ID NO: 2132005 - DNA, 15 bp, Homo sapiens
aatggtccagtattc

SEQ ID NO: 2132006 - DNA, 15 bp, Homo sapiens
atggtccagtattct

SEQ ID NO: 2132007 - DNA, 15 bp, Homo sapiens
tggtccagtattcta

SEQ ID NO: 2132008 - DNA, 15 bp, Homo sapiens
ggtccagtattctat

SEQ ID NO: 2132009 - DNA, 15 bp, Homo sapiens
gtccagtattctata

SEQ ID NO: 2132010 - DNA, 15 bp, Homo sapiens
tccagtattctatag

SEQ ID NO: 2132011 - DNA, 15 bp, Homo sapiens
ccagtattctataga

SEQ ID NO: 2132012 - DNA, 15 bp, Homo sapiens
cagtattctatagaa

SEQ ID NO: 2132013 - DNA, 15 bp, Homo sapiens
agtattctatagaat

SEQ ID NO: 2132014 - DNA, 15 bp, Homo sapiens
gtattctatagaatg

SEQ ID NO: 2132015 - DNA, 15 bp, Homo sapiens
tattctatagaatgt

SEQ ID NO: 2132016 - DNA, 15 bp, Homo sapiens
attctatagaatgtc

SEQ ID NO: 2132017 - DNA, 15 bp, Homo sapiens
ttctatagaatgtct

SEQ ID NO: 2132018 - DNA, 15 bp, Homo sapiens
tctatagaatgtctc

SEQ ID NO: 2132019 - DNA, 15 bp, Homo sapiens
ctatagaatgtctct

SEQ ID NO: 2132020 - DNA, 15 bp, Homo sapiens
tatagaatgtctctc

SEQ ID NO: 2132021 - DNA, 15 bp, Homo sapiens
atagaatgtctctct

SEQ ID NO: 2132022 - DNA, 15 bp, Homo sapiens
tagaatgtctctcta

SEQ ID NO: 2132023 - DNA, 15 bp, Homo sapiens
agaatgtctctctat

SEQ ID NO: 2132024 - DNA, 15 bp, Homo sapiens
gaatgtctctctatt

SEQ ID NO: 2132025 - DNA, 15 bp, Homo sapiens
aatgtctctctattg

SEQ ID NO: 2132026 - DNA, 15 bp, Homo sapiens
atgtctctctattgg

SEQ ID NO: 2132027 - DNA, 15 bp, Homo sapiens
tgtctctctattgga

SEQ ID NO: 2132028 - DNA, 15 bp, Homo sapiens
gtctctctattggaa

SEQ ID NO: 2132029 - DNA, 15 bp, Homo sapiens
tctctctattggaat

SEQ ID NO: 2132030 - DNA, 15 bp, Homo sapiens
ctctctattggaatt

SEQ ID NO: 2132031 - DNA, 15 bp, Homo sapiens
tctctattggaattt

SEQ ID NO: 2132032 - DNA, 15 bp, Homo sapiens
ctctattggaatttg

SEQ ID NO: 2132033 - DNA, 15 bp, Homo sapiens
tctattggaatttgt

SEQ ID NO: 2132034 - DNA, 15 bp, Homo sapiens
ctattggaatttgtc

SEQ ID NO: 2132035 - DNA, 15 bp, Homo sapiens
tattggaatttgtct

SEQ ID NO: 2132036 - DNA, 15 bp, Homo sapiens
attggaatttgtctg

SEQ ID NO: 2132037 - DNA, 15 bp, Homo sapiens
ttggaatttgtctga

SEQ ID NO: 2132038 - DNA, 15 bp, Homo sapiens
tggaatttgtctgat

SEQ ID NO: 2132039 - DNA, 15 bp, Homo sapiens
ggaatttgtctgatg

SEQ ID NO: 2132040 - DNA, 15 bp, Homo sapiens
gaatttgtctgatgt

SEQ ID NO: 2132041 - DNA, 15 bp, Homo sapiens
aatttgtctgatgtt

SEQ ID NO: 2132042 - DNA, 15 bp, Homo sapiens
atttgtctgatgttc

SEQ ID NO: 2132043 - DNA, 15 bp, Homo sapiens
tttgtctgatgttct

SEQ ID NO: 2132044 - DNA, 15 bp, Homo sapiens
ttgtctgatgttctt

SEQ ID NO: 2132045 - DNA, 15 bp, Homo sapiens
tgtctgatgttcttc

SEQ ID NO: 2132046 - DNA, 15 bp, Homo sapiens
gtctgatgttcttct

SEQ ID NO: 2132047 - DNA, 15 bp, Homo sapiens
tctgatgttcttctc

SEQ ID NO: 2132048 - DNA, 15 bp, Homo sapiens
ctgatgttcttctca

SEQ ID NO: 2132049 - DNA, 15 bp, Homo sapiens
tgatgttcttctcat

SEQ ID NO: 2132050 - DNA, 15 bp, Homo sapiens
gatgttcttctcatg

SEQ ID NO: 2132051 - DNA, 15 bp, Homo sapiens
atgttcttctcatga

SEQ ID NO: 2132052 - DNA, 15 bp, Homo sapiens
tgttcttctcatgac

SEQ ID NO: 2132053 - DNA, 15 bp, Homo sapiens
gttcttctcatgact

SEQ ID NO: 2132054 - DNA, 15 bp, Homo sapiens
ttcttctcatgacta

SEQ ID NO: 2132055 - DNA, 15 bp, Homo sapiens
tcttctcatgactag

SEQ ID NO: 2132056 - DNA, 15 bp, Homo sapiens
cttctcatgactaga

SEQ ID NO: 2132057 - DNA, 15 bp, Homo sapiens
ttctcatgactagat

SEQ ID NO: 2132058 - DNA, 15 bp, Homo sapiens
tctcatgactagatt

SEQ ID NO: 2132059 - DNA, 15 bp, Homo sapiens
ctcatgactagattg

SEQ ID NO: 2132060 - DNA, 15 bp, Homo sapiens
tcatgactagattgg

SEQ ID NO: 2132061 - DNA, 15 bp, Homo sapiens
catgactagattggg

SEQ ID NO: 2132062 - DNA, 15 bp, Homo sapiens
atgactagattgggt

SEQ ID NO: 2132063 - DNA, 15 bp, Homo sapiens
tgactagattgggtt

SEQ ID NO: 2132064 - DNA, 15 bp, Homo sapiens
gactagattgggttt

SEQ ID NO: 2132065 - DNA, 15 bp, Homo sapiens
actagattgggttta

SEQ ID NO: 2132066 - DNA, 15 bp, Homo sapiens
ctagattgggtttat

SEQ ID NO: 2132067 - DNA, 15 bp, Homo sapiens
tagattgggtttatg

SEQ ID NO: 2132068 - DNA, 15 bp, Homo sapiens
agattgggtttatga

SEQ ID NO: 2132069 - DNA, 15 bp, Homo sapiens
gattgggtttatgag

SEQ ID NO: 2132070 - DNA, 15 bp, Homo sapiens
attgggtttatgagt

SEQ ID NO: 2132071 - DNA, 15 bp, Homo sapiens
ttgggtttatgagtg

SEQ ID NO: 2132072 - DNA, 15 bp, Homo sapiens
tgggtttatgagtgt

SEQ ID NO: 2132073 - DNA, 15 bp, Homo sapiens
gggtttatgagtgtt

SEQ ID NO: 2132074 - DNA, 15 bp, Homo sapiens
ggtttatgagtgttt

SEQ ID NO: 2132075 - DNA, 15 bp, Homo sapiens
gtttatgagtgttta

SEQ ID NO: 2132076 - DNA, 15 bp, Homo sapiens
tttatgagtgtttag

SEQ ID NO: 2132077 - DNA, 15 bp, Homo sapiens
ttatgagtgtttagg

SEQ ID NO: 2132078 - DNA, 15 bp, Homo sapiens
tatgagtgtttagga

SEQ ID NO: 2132079 - DNA, 15 bp, Homo sapiens
atgagtgtttaggag

SEQ ID NO: 2132080 - DNA, 15 bp, Homo sapiens
tgagtgtttaggagg

SEQ ID NO: 2132081 - DNA, 15 bp, Homo sapiens
gagtgtttaggagga

SEQ ID NO: 2132082 - DNA, 15 bp, Homo sapiens
agtgtttaggaggaa

SEQ ID NO: 2132083 - DNA, 15 bp, Homo sapiens
gtgtttaggaggaag

SEQ ID NO: 2132084 - DNA, 15 bp, Homo sapiens
tgtttaggaggaaga

SEQ ID NO: 2132085 - DNA, 15 bp, Homo sapiens
gtttaggaggaagac

SEQ ID NO: 2132086 - DNA, 15 bp, Homo sapiens
tttaggaggaagacc

SEQ ID NO: 2132087 - DNA, 15 bp, Homo sapiens
ttaggaggaagacca

SEQ ID NO: 2132088 - DNA, 15 bp, Homo sapiens
taggaggaagaccac

SEQ ID NO: 2132089 - DNA, 15 bp, Homo sapiens
aggaggaagaccaca

SEQ ID NO: 2132090 - DNA, 15 bp, Homo sapiens
ggaggaagaccacaa

SEQ ID NO: 2132091 - DNA, 15 bp, Homo sapiens
gaggaagaccacaaa

SEQ ID NO: 2132092 - DNA, 15 bp, Homo sapiens
aggaagaccacaaag

SEQ ID NO: 2132093 - DNA, 15 bp, Homo sapiens
ggaagaccacaaagg

SEQ ID NO: 2132094 - DNA, 15 bp, Homo sapiens
gaagaccacaaaggt

SEQ ID NO: 2132095 - DNA, 15 bp, Homo sapiens
aagaccacaaaggta

SEQ ID NO: 2132096 - DNA, 15 bp, Homo sapiens
agaccacaaaggtag

SEQ ID NO: 2132097 - DNA, 15 bp, Homo sapiens
gaccacaaaggtaga

SEQ ID NO: 2132098 - DNA, 15 bp, Homo sapiens
accacaaaggtagag

SEQ ID NO: 2132099 - DNA, 15 bp, Homo sapiens
ccacaaaggtagagt

SEQ ID NO: 2132100 - DNA, 15 bp, Homo sapiens
cacaaaggtagagtg

SEQ ID NO: 2132101 - DNA, 15 bp, Homo sapiens
acaaaggtagagtgc

SEQ ID NO: 2132102 - DNA, 15 bp, Homo sapiens
caaaggtagagtgcc

SEQ ID NO: 2132103 - DNA, 15 bp, Homo sapiens
aaaggtagagtgcca

SEQ ID NO: 2132104 - DNA, 15 bp, Homo sapiens
aaggtagagtgccat

SEQ ID NO: 2132105 - DNA, 15 bp, Homo sapiens
aggtagagtgccatt

SEQ ID NO: 2132106 - DNA, 15 bp, Homo sapiens
ggtagagtgccattc

SEQ ID NO: 2132107 - DNA, 15 bp, Homo sapiens
gtagagtgccattct

SEQ ID NO: 2132108 - DNA, 15 bp, Homo sapiens
tagagtgccattctt

SEQ ID NO: 2132109 - DNA, 15 bp, Homo sapiens
agagtgccattctta

SEQ ID NO: 2132110 - DNA, 15 bp, Homo sapiens
gagtgccattcttat

SEQ ID NO: 2132111 - DNA, 15 bp, Homo sapiens
agtgccattcttatc

SEQ ID NO: 2132112 - DNA, 15 bp, Homo sapiens
gtgccattcttatca

SEQ ID NO: 2132113 - DNA, 15 bp, Homo sapiens
tgccattcttatcac

SEQ ID NO: 2132114 - DNA, 15 bp, Homo sapiens
gccattcttatcact

SEQ ID NO: 2132115 - DNA, 15 bp, Homo sapiens
ccattcttatcactt

SEQ ID NO: 2132116 - DNA, 15 bp, Homo sapiens
cattcttatcactta

SEQ ID NO: 2132117 - DNA, 15 bp, Homo sapiens
attcttatcacttat

SEQ ID NO: 2132118 - DNA, 15 bp, Homo sapiens
ttcttatcacttatc

SEQ ID NO: 2132119 - DNA, 15 bp, Homo sapiens
tcttatcacttatca

SEQ ID NO: 2132120 - DNA, 15 bp, Homo sapiens
cttatcacttatcaa

SEQ ID NO: 2132121 - DNA, 15 bp, Homo sapiens
ttatcacttatcaag

SEQ ID NO: 2132122 - DNA, 15 bp, Homo sapiens
tatcacttatcaaga

SEQ ID NO: 2132123 - DNA, 15 bp, Homo sapiens
atcacttatcaagag

SEQ ID NO: 2132124 - DNA, 15 bp, Homo sapiens
tcacttatcaagagt

SEQ ID NO: 2132125 - DNA, 15 bp, Homo sapiens
cacttatcaagagta

SEQ ID NO: 2132126 - DNA, 15 bp, Homo sapiens
acttatcaagagtac

SEQ ID NO: 2132127 - DNA, 15 bp, Homo sapiens
cttatcaagagtaca

SEQ ID NO: 2132128 - DNA, 15 bp, Homo sapiens
ttatcaagagtacat

SEQ ID NO: 2132129 - DNA, 15 bp, Homo sapiens
tatcaagagtacata

SEQ ID NO: 2132130 - DNA, 15 bp, Homo sapiens
atcaagagtacatac

SEQ ID NO: 2132131 - DNA, 15 bp, Homo sapiens
tcaagagtacatact

SEQ ID NO: 2132132 - DNA, 15 bp, Homo sapiens
caagagtacatacta

SEQ ID NO: 2132133 - DNA, 15 bp, Homo sapiens
aagagtacatactat

SEQ ID NO: 2132134 - DNA, 15 bp, Homo sapiens
agagtacatactatc

SEQ ID NO: 2132135 - DNA, 15 bp, Homo sapiens
gagtacatactatca

SEQ ID NO: 2132136 - DNA, 15 bp, Homo sapiens
agtacatactatcaa

SEQ ID NO: 2132137 - DNA, 15 bp, Homo sapiens
gtacatactatcaac

SEQ ID NO: 2132138 - DNA, 15 bp, Homo sapiens
tacatactatcaaca

SEQ ID NO: 2132139 - DNA, 15 bp, Homo sapiens
acatactatcaacat

SEQ ID NO: 2132140 - DNA, 15 bp, Homo sapiens
catactatcaacatg

SEQ ID NO: 2132141 - DNA, 15 bp, Homo sapiens
atactatcaacatga

SEQ ID NO: 2132142 - DNA, 15 bp, Homo sapiens
tactatcaacatgac

SEQ ID NO: 2132143 - DNA, 15 bp, Homo sapiens
actatcaacatgact

SEQ ID NO: 2132144 - DNA, 15 bp, Homo sapiens
ctatcaacatgactt

SEQ ID NO: 2132145 - DNA, 15 bp, Homo sapiens
tatcaacatgactta

SEQ ID NO: 2132146 - DNA, 15 bp, Homo sapiens
atcaacatgacttat

SEQ ID NO: 2132147 - DNA, 15 bp, Homo sapiens
tcaacatgacttatc

SEQ ID NO: 2132148 - DNA, 15 bp, Homo sapiens
caacatgacttatca

SEQ ID NO: 2132149 - DNA, 15 bp, Homo sapiens
aacatgacttatcac

SEQ ID NO: 2132150 - DNA, 15 bp, Homo sapiens
acatgacttatcact

SEQ ID NO: 2132151 - DNA, 15 bp, Homo sapiens
catgacttatcactg

SEQ ID NO: 2132152 - DNA, 15 bp, Homo sapiens
atgacttatcactgt

SEQ ID NO: 2132153 - DNA, 15 bp, Homo sapiens
tgacttatcactgtt

SEQ ID NO: 2132154 - DNA, 15 bp, Homo sapiens
gacttatcactgttt

SEQ ID NO: 2132155 - DNA, 15 bp, Homo sapiens
acttatcactgttta

SEQ ID NO: 2132156 - DNA, 15 bp, Homo sapiens
cttatcactgtttat

SEQ ID NO: 2132157 - DNA, 15 bp, Homo sapiens
ttatcactgtttatg

SEQ ID NO: 2132158 - DNA, 15 bp, Homo sapiens
tatcactgtttatgt

SEQ ID NO: 2132159 - DNA, 15 bp, Homo sapiens
atcactgtttatgtt

SEQ ID NO: 2132160 - DNA, 15 bp, Homo sapiens
tcactgtttatgtta

SEQ ID NO: 2132161 - DNA, 15 bp, Homo sapiens
cactgtttatgttat

SEQ ID NO: 2132162 - DNA, 15 bp, Homo sapiens
actgtttatgttatc

SEQ ID NO: 2132163 - DNA, 15 bp, Homo sapiens
ctgtttatgttatcc

SEQ ID NO: 2132164 - DNA, 15 bp, Homo sapiens
tgtttatgttatcct

SEQ ID NO: 2132165 - DNA, 15 bp, Homo sapiens
gtttatgttatcctt

SEQ ID NO: 2132166 - DNA, 15 bp, Homo sapiens
tttatgttatcctta

SEQ ID NO: 2132167 - DNA, 15 bp, Homo sapiens
ttatgttatccttaa

SEQ ID NO: 2132168 - DNA, 15 bp, Homo sapiens
tatgttatccttaat

SEQ ID NO: 2132169 - DNA, 15 bp, Homo sapiens
atgttatccttaatc

SEQ ID NO: 2132170 - DNA, 15 bp, Homo sapiens
tgttatccttaatca

SEQ ID NO: 2132171 - DNA, 15 bp, Homo sapiens
gttatccttaatcac

SEQ ID NO: 2132172 - DNA, 15 bp, Homo sapiens
ttatccttaatcacc

SEQ ID NO: 2132173 - DNA, 15 bp, Homo sapiens
tatccttaatcacct

SEQ ID NO: 2132174 - DNA, 15 bp, Homo sapiens
atccttaatcacctg

SEQ ID NO: 2132175 - DNA, 15 bp, Homo sapiens
tccttaatcacctgt

SEQ ID NO: 2132176 - DNA, 15 bp, Homo sapiens
ccttaatcacctgtc

SEQ ID NO: 2132177 - DNA, 15 bp, Homo sapiens
cttaatcacctgtct

SEQ ID NO: 2132178 - DNA, 15 bp, Homo sapiens
ttaatcacctgtctg

SEQ ID NO: 2132179 - DNA, 15 bp, Homo sapiens
taatcacctgtctga

SEQ ID NO: 2132180 - DNA, 15 bp, Homo sapiens
aatcacctgtctgag

SEQ ID NO: 2132181 - DNA, 15 bp, Homo sapiens
atcacctgtctgagg

SEQ ID NO: 2132182 - DNA, 15 bp, Homo sapiens
tcacctgtctgaggt

SEQ ID NO: 2132183 - DNA, 15 bp, Homo sapiens
cacctgtctgaggta

SEQ ID NO: 2132184 - DNA, 15 bp, Homo sapiens
acctgtctgaggtac

SEQ ID NO: 2132185 - DNA, 15 bp, Homo sapiens
cctgtctgaggtact

SEQ ID NO: 2132186 - DNA, 15 bp, Homo sapiens
ctgtctgaggtacta

SEQ ID NO: 2132187 - DNA, 15 bp, Homo sapiens
tgtctgaggtactat

SEQ ID NO: 2132188 - DNA, 15 bp, Homo sapiens
gtctgaggtactatt

SEQ ID NO: 2132189 - DNA, 15 bp, Homo sapiens
tctgaggtactattt

SEQ ID NO: 2132190 - DNA, 15 bp, Homo sapiens
ctgaggtactatttg

SEQ ID NO: 2132191 - DNA, 15 bp, Homo sapiens
tgaggtactatttgt

SEQ ID NO: 2132192 - DNA, 15 bp, Homo sapiens
gaggtactatttgtc

SEQ ID NO: 2132193 - DNA, 15 bp, Homo sapiens
aggtactatttgtca

SEQ ID NO: 2132194 - DNA, 15 bp, Homo sapiens
ggtactatttgtcag

SEQ ID NO: 2132195 - DNA, 15 bp, Homo sapiens
gtactatttgtcagg

SEQ ID NO: 2132196 - DNA, 15 bp, Homo sapiens
tactatttgtcaggt

SEQ ID NO: 2132197 - DNA, 15 bp, Homo sapiens
actatttgtcaggtt

SEQ ID NO: 2132198 - DNA, 15 bp, Homo sapiens
ctatttgtcaggttt

SEQ ID NO: 2132199 - DNA, 15 bp, Homo sapiens
tatttgtcaggtttc

SEQ ID NO: 2132200 - DNA, 15 bp, Homo sapiens
atttgtcaggtttct

SEQ ID NO: 2132201 - DNA, 15 bp, Homo sapiens
tttgtcaggtttctc

SEQ ID NO: 2132202 - DNA, 15 bp, Homo sapiens
ttgtcaggtttctcc

SEQ ID NO: 2132203 - DNA, 15 bp, Homo sapiens
tgtcaggtttctcca

SEQ ID NO: 2132204 - DNA, 15 bp, Homo sapiens
gtcaggtttctccag

SEQ ID NO: 2132205 - DNA, 15 bp, Homo sapiens
tcaggtttctccagc

SEQ ID NO: 2132206 - DNA, 15 bp, Homo sapiens
caggtttctccagcg

SEQ ID NO: 2132207 - DNA, 15 bp, Homo sapiens
aggtttctccagcgt

SEQ ID NO: 2132208 - DNA, 15 bp, Homo sapiens
ggtttctccagcgta

SEQ ID NO: 2132209 - DNA, 15 bp, Homo sapiens
gtttctccagcgtaa

SEQ ID NO: 2132210 - DNA, 15 bp, Homo sapiens
tttctccagcgtaaa

SEQ ID NO: 2132211 - DNA, 15 bp, Homo sapiens
ttctccagcgtaaaa

SEQ ID NO: 2132212 - DNA, 15 bp, Homo sapiens
tctccagcgtaaaat

SEQ ID NO: 2132213 - DNA, 15 bp, Homo sapiens
ctccagcgtaaaatt

SEQ ID NO: 2132214 - DNA, 15 bp, Homo sapiens
tccagcgtaaaatta

SEQ ID NO: 2132215 - DNA, 15 bp, Homo sapiens
ccagcgtaaaattag

SEQ ID NO: 2132216 - DNA, 15 bp, Homo sapiens
cagcgtaaaattagt

SEQ ID NO: 2132217 - DNA, 15 bp, Homo sapiens
agcgtaaaattagtc

SEQ ID NO: 2132218 - DNA, 15 bp, Homo sapiens
gcgtaaaattagtct

SEQ ID NO: 2132219 - DNA, 15 bp, Homo sapiens
cgtaaaattagtctt

SEQ ID NO: 2132220 - DNA, 15 bp, Homo sapiens
gtaaaattagtcttt

SEQ ID NO: 2132221 - DNA, 15 bp, Homo sapiens
taaaattagtcttta

SEQ ID NO: 2132222 - DNA, 15 bp, Homo sapiens
aaaattagtctttat

SEQ ID NO: 2132223 - DNA, 15 bp, Homo sapiens
aaattagtctttatt

SEQ ID NO: 2132224 - DNA, 15 bp, Homo sapiens
aattagtctttattt

SEQ ID NO: 2132225 - DNA, 15 bp, Homo sapiens
attagtctttatttc

SEQ ID NO: 2132226 - DNA, 15 bp, Homo sapiens
ttagtctttatttct

SEQ ID NO: 2132227 - DNA, 15 bp, Homo sapiens
tagtctttatttctc

SEQ ID NO: 2132228 - DNA, 15 bp, Homo sapiens
agtctttatttctcc

SEQ ID NO: 2132229 - DNA, 15 bp, Homo sapiens
gtctttatttctcca

SEQ ID NO: 2132230 - DNA, 15 bp, Homo sapiens
tctttatttctccat

SEQ ID NO: 2132231 - DNA, 15 bp, Homo sapiens
ctttatttctccatt

SEQ ID NO: 2132232 - DNA, 15 bp, Homo sapiens
tttatttctccattt

SEQ ID NO: 2132233 - DNA, 15 bp, Homo sapiens
ttatttctccatttc

SEQ ID NO: 2132234 - DNA, 15 bp, Homo sapiens
tatttctccatttcc

SEQ ID NO: 2132235 - DNA, 15 bp, Homo sapiens
atttctccatttccc

SEQ ID NO: 2132236 - DNA, 15 bp, Homo sapiens
tttctccatttccct

SEQ ID NO: 2132237 - DNA, 15 bp, Homo sapiens
ttctccatttcccta

SEQ ID NO: 2132238 - DNA, 15 bp, Homo sapiens
tctccatttccctac

SEQ ID NO: 2132239 - DNA, 15 bp, Homo sapiens
ctccatttccctact

SEQ ID NO: 2132240 - DNA, 15 bp, Homo sapiens
tccatttccctacta

SEQ ID NO: 2132241 - DNA, 15 bp, Homo sapiens
ccatttccctactat

SEQ ID NO: 2132242 - DNA, 15 bp, Homo sapiens
catttccctactata

SEQ ID NO: 2132243 - DNA, 15 bp, Homo sapiens
atttccctactatac

SEQ ID NO: 2132244 - DNA, 15 bp, Homo sapiens
tttccctactatact

SEQ ID NO: 2132245 - DNA, 15 bp, Homo sapiens
ttccctactatactg

SEQ ID NO: 2132246 - DNA, 15 bp, Homo sapiens
tccctactatactgt

SEQ ID NO: 2132247 - DNA, 15 bp, Homo sapiens
ccctactatactgtt

SEQ ID NO: 2132248 - DNA, 15 bp, Homo sapiens
cctactatactgttc

SEQ ID NO: 2132249 - DNA, 15 bp, Homo sapiens
ctactatactgttca

SEQ ID NO: 2132250 - DNA, 15 bp, Homo sapiens
tactatactgttcac

SEQ ID NO: 2132251 - DNA, 15 bp, Homo sapiens
actatactgttcaca

SEQ ID NO: 2132252 - DNA, 15 bp, Homo sapiens
ctatactgttcacat

SEQ ID NO: 2132253 - DNA, 15 bp, Homo sapiens
tatactgttcacata

SEQ ID NO: 2132254 - DNA, 15 bp, Homo sapiens
atactgttcacatag

SEQ ID NO: 2132255 - DNA, 15 bp, Homo sapiens
tactgttcacatagg

SEQ ID NO: 2132256 - DNA, 15 bp, Homo sapiens
actgttcacatagga

SEQ ID NO: 2132257 - DNA, 15 bp, Homo sapiens
ctgttcacataggaa

SEQ ID NO: 2132258 - DNA, 15 bp, Homo sapiens
tgttcacataggaag

SEQ ID NO: 2132259 - DNA, 15 bp, Homo sapiens
gttcacataggaagt

SEQ ID NO: 2132260 - DNA, 15 bp, Homo sapiens
ttcacataggaagtc

SEQ ID NO: 2132261 - DNA, 15 bp, Homo sapiens
tcacataggaagtca

SEQ ID NO: 2132262 - DNA, 15 bp, Homo sapiens
cacataggaagtcac

SEQ ID NO: 2132263 - DNA, 15 bp, Homo sapiens
acataggaagtcact

SEQ ID NO: 2132264 - DNA, 15 bp, Homo sapiens
cataggaagtcacta

SEQ ID NO: 2132265 - DNA, 15 bp, Homo sapiens
ataggaagtcactat

SEQ ID NO: 2132266 - DNA, 15 bp, Homo sapiens
taggaagtcactatg

SEQ ID NO: 2132267 - DNA, 15 bp, Homo sapiens
aggaagtcactatgt

SEQ ID NO: 2132268 - DNA, 15 bp, Homo sapiens
ggaagtcactatgtg

SEQ ID NO: 2132269 - DNA, 15 bp, Homo sapiens
gaagtcactatgtgc

SEQ ID NO: 2132270 - DNA, 15 bp, Homo sapiens
aagtcactatgtgca

SEQ ID NO: 2132271 - DNA, 15 bp, Homo sapiens
agtcactatgtgcag

SEQ ID NO: 2132272 - DNA, 15 bp, Homo sapiens
gtcactatgtgcagc

SEQ ID NO: 2132273 - DNA, 15 bp, Homo sapiens
tcactatgtgcagcc

SEQ ID NO: 2132274 - DNA, 15 bp, Homo sapiens
cactatgtgcagcca

SEQ ID NO: 2132275 - DNA, 15 bp, Homo sapiens
actatgtgcagccag

SEQ ID NO: 2132276 - DNA, 15 bp, Homo sapiens
ctatgtgcagccagc

SEQ ID NO: 2132277 - DNA, 15 bp, Homo sapiens
tatgtgcagccagca

SEQ ID NO: 2132278 - DNA, 15 bp, Homo sapiens
atgtgcagccagcac

SEQ ID NO: 2132279 - DNA, 15 bp, Homo sapiens
tgtgcagccagcact

SEQ ID NO: 2132280 - DNA, 15 bp, Homo sapiens
gtgcagccagcactt

SEQ ID NO: 2132281 - DNA, 15 bp, Homo sapiens
tgcagccagcactta

SEQ ID NO: 2132282 - DNA, 15 bp, Homo sapiens
gcagccagcacttaa

SEQ ID NO: 2132283 - DNA, 15 bp, Homo sapiens
cagccagcacttaag

SEQ ID NO: 2132284 - DNA, 15 bp, Homo sapiens
agccagcacttaagg

SEQ ID NO: 2132285 - DNA, 15 bp, Homo sapiens
gccagcacttaagga

SEQ ID NO: 2132286 - DNA, 15 bp, Homo sapiens
ccagcacttaaggaa

SEQ ID NO: 2132287 - DNA, 15 bp, Homo sapiens
cagcacttaaggaat

SEQ ID NO: 2132288 - DNA, 15 bp, Homo sapiens
agcacttaaggaatg

SEQ ID NO: 2132289 - DNA, 15 bp, Homo sapiens
gcacttaaggaatgg

SEQ ID NO: 2132290 - DNA, 15 bp, Homo sapiens
cacttaaggaatggg

SEQ ID NO: 2132291 - DNA, 15 bp, Homo sapiens
acttaaggaatggga

SEQ ID NO: 2132292 - DNA, 15 bp, Homo sapiens
cttaaggaatgggaa

SEQ ID NO: 2132293 - DNA, 15 bp, Homo sapiens
ttaaggaatgggaaa

SEQ ID NO: 2132294 - DNA, 15 bp, Homo sapiens
taaggaatgggaaat

SEQ ID NO: 2132295 - DNA, 15 bp, Homo sapiens
aaggaatgggaaatt

SEQ ID NO: 2132296 - DNA, 15 bp, Homo sapiens
aggaatgggaaatta

SEQ ID NO: 2132297 - DNA, 15 bp, Homo sapiens
ggaatgggaaattac

SEQ ID NO: 2132298 - DNA, 15 bp, Homo sapiens
gaatgggaaattacc

SEQ ID NO: 2132299 - DNA, 15 bp, Homo sapiens
aatgggaaattacct

SEQ ID NO: 2132300 - DNA, 15 bp, Homo sapiens
atgggaaattacctt

SEQ ID NO: 2132301 - DNA, 15 bp, Homo sapiens
tgggaaattaccttc

SEQ ID NO: 2132302 - DNA, 15 bp, Homo sapiens
gggaaattaccttcc

SEQ ID NO: 2132303 - DNA, 15 bp, Homo sapiens
ggaaattaccttcca

SEQ ID NO: 2132304 - DNA, 15 bp, Homo sapiens
gaaattaccttccac

SEQ ID NO: 2132305 - DNA, 15 bp, Homo sapiens
aaattaccttccacc

SEQ ID NO: 2132306 - DNA, 15 bp, Homo sapiens
aattaccttccacct

SEQ ID NO: 2132307 - DNA, 15 bp, Homo sapiens
attaccttccacctc

SEQ ID NO: 2132308 - DNA, 15 bp, Homo sapiens
ttaccttccacctca

SEQ ID NO: 2132309 - DNA, 15 bp, Homo sapiens
taccttccacctcat

SEQ ID NO: 2132310 - DNA, 15 bp, Homo sapiens
accttccacctcatt

SEQ ID NO: 2132311 - DNA, 15 bp, Homo sapiens
ccttccacctcattg

SEQ ID NO: 2132312 - DNA, 15 bp, Homo sapiens
cttccacctcattga

SEQ ID NO: 2132313 - DNA, 15 bp, Homo sapiens
ttccacctcattgag

SEQ ID NO: 2132314 - DNA, 15 bp, Homo sapiens
tccacctcattgagg

SEQ ID NO: 2132315 - DNA, 15 bp, Homo sapiens
ccacctcattgaggg

SEQ ID NO: 2132316 - DNA, 15 bp, Homo sapiens
cacctcattgagggc

SEQ ID NO: 2132317 - DNA, 15 bp, Homo sapiens
acctcattgagggca

SEQ ID NO: 2132318 - DNA, 15 bp, Homo sapiens
cctcattgagggcag

SEQ ID NO: 2132319 - DNA, 15 bp, Homo sapiens
ctcattgagggcaga

SEQ ID NO: 2132320 - DNA, 15 bp, Homo sapiens
tcattgagggcagag

SEQ ID NO: 2132321 - DNA, 15 bp, Homo sapiens
cattgagggcagagt

SEQ ID NO: 2132322 - DNA, 15 bp, Homo sapiens
attgagggcagagta

SEQ ID NO: 2132323 - DNA, 15 bp, Homo sapiens
ttgagggcagagtat

SEQ ID NO: 2132324 - DNA, 15 bp, Homo sapiens
tgagggcagagtatt

SEQ ID NO: 2132325 - DNA, 15 bp, Homo sapiens
gagggcagagtattt

SEQ ID NO: 2132326 - DNA, 15 bp, Homo sapiens
agggcagagtattta

SEQ ID NO: 2132327 - DNA, 15 bp, Homo sapiens
gggcagagtatttac

SEQ ID NO: 2132328 - DNA, 15 bp, Homo sapiens
ggcagagtatttaca

SEQ ID NO: 2132329 - DNA, 15 bp, Homo sapiens
gcagagtatttacat

SEQ ID NO: 2132330 - DNA, 15 bp, Homo sapiens
cagagtatttacata

SEQ ID NO: 2132331 - DNA, 15 bp, Homo sapiens
agagtatttacataa

SEQ ID NO: 2132332 - DNA, 15 bp, Homo sapiens
gagtatttacataaa

SEQ ID NO: 2132333 - DNA, 15 bp, Homo sapiens
agtatttacataaat

SEQ ID NO: 2132334 - DNA, 15 bp, Homo sapiens
gtatttacataaatt

SEQ ID NO: 2132335 - DNA, 15 bp, Homo sapiens
tatttacataaatta

SEQ ID NO: 2132336 - DNA, 15 bp, Homo sapiens
atttacataaattat

SEQ ID NO: 2132337 - DNA, 15 bp, Homo sapiens
tttacataaattatt

SEQ ID NO: 2132338 - DNA, 15 bp, Homo sapiens
ttacataaattattt

SEQ ID NO: 2132339 - DNA, 15 bp, Homo sapiens
tacataaattatttg

SEQ ID NO: 2132340 - DNA, 15 bp, Homo sapiens
acataaattatttgg

SEQ ID NO: 2132341 - DNA, 15 bp, Homo sapiens
cataaattatttgga

SEQ ID NO: 2132342 - DNA, 15 bp, Homo sapiens
ataaattatttggaa

SEQ ID NO: 2132343 - DNA, 15 bp, Homo sapiens
taaattatttggaat

SEQ ID NO: 2132344 - DNA, 15 bp, Homo sapiens
aaattatttggaatt

SEQ ID NO: 2132345 - DNA, 15 bp, Homo sapiens
aattatttggaattc

SEQ ID NO: 2132346 - DNA, 15 bp, Homo sapiens
attatttggaattct

SEQ ID NO: 2132347 - DNA, 15 bp, Homo sapiens
ttatttggaattctt

SEQ ID NO: 2132348 - DNA, 15 bp, Homo sapiens
tatttggaattcttt

SEQ ID NO: 2132349 - DNA, 15 bp, Homo sapiens
atttggaattctttt

SEQ ID NO: 2132350 - DNA, 15 bp, Homo sapiens
tttggaattcttttg

SEQ ID NO: 2132351 - DNA, 15 bp, Homo sapiens
ttggaattcttttgc

SEQ ID NO: 2132352 - DNA, 15 bp, Homo sapiens
tggaattcttttgca

SEQ ID NO: 2132353 - DNA, 15 bp, Homo sapiens
ggaattcttttgcac

SEQ ID NO: 2132354 - DNA, 15 bp, Homo sapiens
gaattcttttgcaca

SEQ ID NO: 2132355 - DNA, 15 bp, Homo sapiens
aattcttttgcacag

SEQ ID NO: 2132356 - DNA, 15 bp, Homo sapiens
attcttttgcacagg

SEQ ID NO: 2132357 - DNA, 15 bp, Homo sapiens
ttcttttgcacagga

SEQ ID NO: 2132358 - DNA, 15 bp, Homo sapiens
tcttttgcacaggat

SEQ ID NO: 2132359 - DNA, 15 bp, Homo sapiens
cttttgcacaggatg

SEQ ID NO: 2132360 - DNA, 15 bp, Homo sapiens
ttttgcacaggatgt

SEQ ID NO: 2132361 - DNA, 15 bp, Homo sapiens
tttgcacaggatgtc

SEQ ID NO: 2132362 - DNA, 15 bp, Homo sapiens
ttgcacaggatgtct

SEQ ID NO: 2132363 - DNA, 15 bp, Homo sapiens
tgcacaggatgtctt

SEQ ID NO: 2132364 - DNA, 15 bp, Homo sapiens
gcacaggatgtcttt

SEQ ID NO: 2132365 - DNA, 15 bp, Homo sapiens
cacaggatgtctttt

SEQ ID NO: 2132366 - DNA, 15 bp, Homo sapiens
acaggatgtcttttc

SEQ ID NO: 2132367 - DNA, 15 bp, Homo sapiens
caggatgtcttttct

SEQ ID NO: 2132368 - DNA, 15 bp, Homo sapiens
aggatgtcttttctc

SEQ ID NO: 2132369 - DNA, 15 bp, Homo sapiens
ggatgtcttttctcc

SEQ ID NO: 2132370 - DNA, 15 bp, Homo sapiens
gatgtcttttctcca

SEQ ID NO: 2132371 - DNA, 15 bp, Homo sapiens
atgtcttttctccac

SEQ ID NO: 2132372 - DNA, 15 bp, Homo sapiens
tgtcttttctccaca

SEQ ID NO: 2132373 - DNA, 15 bp, Homo sapiens
gtcttttctccacaa

SEQ ID NO: 2132374 - DNA, 15 bp, Homo sapiens
tcttttctccacaat

SEQ ID NO: 2132375 - DNA, 15 bp, Homo sapiens
cttttctccacaatg

SEQ ID NO: 2132376 - DNA, 15 bp, Homo sapiens
ttttctccacaatgt

SEQ ID NO: 2132377 - DNA, 15 bp, Homo sapiens
tttctccacaatgta

SEQ ID NO: 2132378 - DNA, 15 bp, Homo sapiens
ttctccacaatgtat

SEQ ID NO: 2132379 - DNA, 15 bp, Homo sapiens
tctccacaatgtatt

SEQ ID NO: 2132380 - DNA, 15 bp, Homo sapiens
ctccacaatgtattg

SEQ ID NO: 2132381 - DNA, 15 bp, Homo sapiens
tccacaatgtattgt

SEQ ID NO: 2132382 - DNA, 15 bp, Homo sapiens
ccacaatgtattgtg

SEQ ID NO: 2132383 - DNA, 15 bp, Homo sapiens
cacaatgtattgtgt

SEQ ID NO: 2132384 - DNA, 15 bp, Homo sapiens
acaatgtattgtgtt

SEQ ID NO: 2132385 - DNA, 15 bp, Homo sapiens
caatgtattgtgttt

SEQ ID NO: 2132386 - DNA, 15 bp, Homo sapiens
aatgtattgtgttta

SEQ ID NO: 2132387 - DNA, 15 bp, Homo sapiens
atgtattgtgtttat

SEQ ID NO: 2132388 - DNA, 15 bp, Homo sapiens
tgtattgtgtttatt

SEQ ID NO: 2132389 - DNA, 15 bp, Homo sapiens
gtattgtgtttattc

SEQ ID NO: 2132390 - DNA, 15 bp, Homo sapiens
tattgtgtttattca

SEQ ID NO: 2132391 - DNA, 15 bp, Homo sapiens
attgtgtttattcag

SEQ ID NO: 2132392 - DNA, 15 bp, Homo sapiens
ttgtgtttattcagt

SEQ ID NO: 2132393 - DNA, 15 bp, Homo sapiens
tgtgtttattcagtc

SEQ ID NO: 2132394 - DNA, 15 bp, Homo sapiens
gtgtttattcagtca

SEQ ID NO: 2132395 - DNA, 15 bp, Homo sapiens
tgtttattcagtcat

SEQ ID NO: 2132396 - DNA, 15 bp, Homo sapiens
gtttattcagtcatt

SEQ ID NO: 2132397 - DNA, 15 bp, Homo sapiens
tttattcagtcattt

SEQ ID NO: 2132398 - DNA, 15 bp, Homo sapiens
ttattcagtcattta

SEQ ID NO: 2132399 - DNA, 15 bp, Homo sapiens
tattcagtcatttat

SEQ ID NO: 2132400 - DNA, 15 bp, Homo sapiens
attcagtcatttata

SEQ ID NO: 2132401 - DNA, 15 bp, Homo sapiens
ttcagtcatttatat

SEQ ID NO: 2132402 - DNA, 15 bp, Homo sapiens
tcagtcatttatatc

SEQ ID NO: 2132403 - DNA, 15 bp, Homo sapiens
cagtcatttatatca

SEQ ID NO: 2132404 - DNA, 15 bp, Homo sapiens
agtcatttatatcag

SEQ ID NO: 2132405 - DNA, 15 bp, Homo sapiens
gtcatttatatcagt

SEQ ID NO: 2132406 - DNA, 15 bp, Homo sapiens
tcatttatatcagta

SEQ ID NO: 2132407 - DNA, 15 bp, Homo sapiens
catttatatcagtat

SEQ ID NO: 2132408 - DNA, 15 bp, Homo sapiens
atttatatcagtatg

SEQ ID NO: 2132409 - DNA, 15 bp, Homo sapiens
tttatatcagtatga

SEQ ID NO: 2132410 - DNA, 15 bp, Homo sapiens
ttatatcagtatgat

SEQ ID NO: 2132411 - DNA, 15 bp, Homo sapiens
tatatcagtatgatc

SEQ ID NO: 2132412 - DNA, 15 bp, Homo sapiens
atatcagtatgatct

SEQ ID NO: 2132413 - DNA, 15 bp, Homo sapiens
tatcagtatgatctc

SEQ ID NO: 2132414 - DNA, 15 bp, Homo sapiens
atcagtatgatctca

SEQ ID NO: 2132415 - DNA, 15 bp, Homo sapiens
tcagtatgatctcag

SEQ ID NO: 2132416 - DNA, 15 bp, Homo sapiens
cagtatgatctcagg

SEQ ID NO: 2132417 - DNA, 15 bp, Homo sapiens
agtatgatctcaggg

SEQ ID NO: 2132418 - DNA, 15 bp, Homo sapiens
gtatgatctcaggga

SEQ ID NO: 2132419 - DNA, 15 bp, Homo sapiens
tatgatctcagggat

SEQ ID NO: 2132420 - DNA, 15 bp, Homo sapiens
atgatctcagggata

SEQ ID NO: 2132421 - DNA, 15 bp, Homo sapiens
tgatctcagggatat

SEQ ID NO: 2132422 - DNA, 15 bp, Homo sapiens
gatctcagggatatt

SEQ ID NO: 2132423 - DNA, 15 bp, Homo sapiens
atctcagggatattt

SEQ ID NO: 2132424 - DNA, 15 bp, Homo sapiens
tctcagggatatttt

SEQ ID NO: 2132425 - DNA, 15 bp, Homo sapiens
ctcagggatatttta

SEQ ID NO: 2132426 - DNA, 15 bp, Homo sapiens
tcagggatattttat

SEQ ID NO: 2132427 - DNA, 15 bp, Homo sapiens
cagggatattttata

SEQ ID NO: 2132428 - DNA, 15 bp, Homo sapiens
agggatattttatac

SEQ ID NO: 2132429 - DNA, 15 bp, Homo sapiens
gggatattttatact

SEQ ID NO: 2132430 - DNA, 15 bp, Homo sapiens
ggatattttatactc

SEQ ID NO: 2132431 - DNA, 15 bp, Homo sapiens
gatattttatactct

SEQ ID NO: 2132432 - DNA, 15 bp, Homo sapiens
atattttatactctg

SEQ ID NO: 2132433 - DNA, 15 bp, Homo sapiens
tattttatactctgg

SEQ ID NO: 2132434 - DNA, 15 bp, Homo sapiens
attttatactctggg

SEQ ID NO: 2132435 - DNA, 15 bp, Homo sapiens
ttttatactctgggt

SEQ ID NO: 2132436 - DNA, 15 bp, Homo sapiens
tttatactctgggtt

SEQ ID NO: 2132437 - DNA, 15 bp, Homo sapiens
ttatactctgggtta

SEQ ID NO: 2132438 - DNA, 15 bp, Homo sapiens
tatactctgggttat

SEQ ID NO: 2132439 - DNA, 15 bp, Homo sapiens
atactctgggttata

SEQ ID NO: 2132440 - DNA, 15 bp, Homo sapiens
tactctgggttataa

SEQ ID NO: 2132441 - DNA, 15 bp, Homo sapiens
actctgggttataat

SEQ ID NO: 2132442 - DNA, 15 bp, Homo sapiens
ctctgggttataata

SEQ ID NO: 2132443 - DNA, 15 bp, Homo sapiens
tctgggttataatac

SEQ ID NO: 2132444 - DNA, 15 bp, Homo sapiens
ctgggttataataca

SEQ ID NO: 2132445 - DNA, 15 bp, Homo sapiens
tgggttataatacag

SEQ ID NO: 2132446 - DNA, 15 bp, Homo sapiens
gggttataatacagt

SEQ ID NO: 2132447 - DNA, 15 bp, Homo sapiens
ggttataatacagta

SEQ ID NO: 2132448 - DNA, 15 bp, Homo sapiens
gttataatacagtat

SEQ ID NO: 2132449 - DNA, 15 bp, Homo sapiens
ttataatacagtatt

SEQ ID NO: 2132450 - DNA, 15 bp, Homo sapiens
tataatacagtatta

SEQ ID NO: 2132451 - DNA, 15 bp, Homo sapiens
ataatacagtattac

SEQ ID NO: 2132452 - DNA, 15 bp, Homo sapiens
taatacagtattact

SEQ ID NO: 2132453 - DNA, 15 bp, Homo sapiens
aatacagtattactt

SEQ ID NO: 2132454 - DNA, 15 bp, Homo sapiens
atacagtattacttt

SEQ ID NO: 2132455 - DNA, 15 bp, Homo sapiens
tacagtattacttta

SEQ ID NO: 2132456 - DNA, 15 bp, Homo sapiens
acagtattactttat

SEQ ID NO: 2132457 - DNA, 15 bp, Homo sapiens
cagtattactttatt

SEQ ID NO: 2132458 - DNA, 15 bp, Homo sapiens
agtattactttattc

SEQ ID NO: 2132459 - DNA, 15 bp, Homo sapiens
gtattactttattct

SEQ ID NO: 2132460 - DNA, 15 bp, Homo sapiens
tattactttattctg

SEQ ID NO: 2132461 - DNA, 15 bp, Homo sapiens
attactttattctgt

SEQ ID NO: 2132462 - DNA, 15 bp, Homo sapiens
ttactttattctgtt

SEQ ID NO: 2132463 - DNA, 15 bp, Homo sapiens
tactttattctgttg

SEQ ID NO: 2132464 - DNA, 15 bp, Homo sapiens
actttattctgttgt

SEQ ID NO: 2132465 - DNA, 15 bp, Homo sapiens
ctttattctgttgtt

SEQ ID NO: 2132466 - DNA, 15 bp, Homo sapiens
tttattctgttgttc

SEQ ID NO: 2132467 - DNA, 15 bp, Homo sapiens
ttattctgttgttca

SEQ ID NO: 2132468 - DNA, 15 bp, Homo sapiens
tattctgttgttcaa

SEQ ID NO: 2132469 - DNA, 15 bp, Homo sapiens
attctgttgttcaaa

SEQ ID NO: 2132470 - DNA, 15 bp, Homo sapiens
ttctgttgttcaaat

SEQ ID NO: 2132471 - DNA, 15 bp, Homo sapiens
tctgttgttcaaatt

SEQ ID NO: 2132472 - DNA, 15 bp, Homo sapiens
ctgttgttcaaattg

SEQ ID NO: 2132473 - DNA, 15 bp, Homo sapiens
tgttgttcaaattgt

SEQ ID NO: 2132474 - DNA, 15 bp, Homo sapiens
gttgttcaaattgtt

SEQ ID NO: 2132475 - DNA, 15 bp, Homo sapiens
ttgttcaaattgttc

SEQ ID NO: 2132476 - DNA, 15 bp, Homo sapiens
tgttcaaattgttcc

SEQ ID NO: 2132477 - DNA, 15 bp, Homo sapiens
gttcaaattgttcca

SEQ ID NO: 2132478 - DNA, 15 bp, Homo sapiens
ttcaaattgttccag

SEQ ID NO: 2132479 - DNA, 15 bp, Homo sapiens
tcaaattgttccagc

SEQ ID NO: 2132480 - DNA, 15 bp, Homo sapiens
caaattgttccagct

SEQ ID NO: 2132481 - DNA, 15 bp, Homo sapiens
aaattgttccagctt

SEQ ID NO: 2132482 - DNA, 15 bp, Homo sapiens
aattgttccagcttt

SEQ ID NO: 2132483 - DNA, 15 bp, Homo sapiens
attgttccagctttg

SEQ ID NO: 2132484 - DNA, 15 bp, Homo sapiens
ttgttccagctttgg

SEQ ID NO: 2132485 - DNA, 15 bp, Homo sapiens
tgttccagctttggc

SEQ ID NO: 2132486 - DNA, 15 bp, Homo sapiens
gttccagctttggcc

SEQ ID NO: 2132487 - DNA, 15 bp, Homo sapiens
ttccagctttggcca

SEQ ID NO: 2132488 - DNA, 15 bp, Homo sapiens
tccagctttggccat

SEQ ID NO: 2132489 - DNA, 15 bp, Homo sapiens
ccagctttggccatt

SEQ ID NO: 2132490 - DNA, 15 bp, Homo sapiens
cagctttggccattg

SEQ ID NO: 2132491 - DNA, 15 bp, Homo sapiens
agctttggccattgg

SEQ ID NO: 2132492 - DNA, 15 bp, Homo sapiens
gctttggccattggg

SEQ ID NO: 2132493 - DNA, 15 bp, Homo sapiens
ctttggccattggga

SEQ ID NO: 2132494 - DNA, 15 bp, Homo sapiens
tttggccattgggag

SEQ ID NO: 2132495 - DNA, 15 bp, Homo sapiens
ttggccattgggagg

SEQ ID NO: 2132496 - DNA, 15 bp, Homo sapiens
tggccattgggaggt

SEQ ID NO: 2132497 - DNA, 15 bp, Homo sapiens
ggccattgggaggtc

SEQ ID NO: 2132498 - DNA, 15 bp, Homo sapiens
gccattgggaggtct

SEQ ID NO: 2132499 - DNA, 15 bp, Homo sapiens
ccattgggaggtctt

SEQ ID NO: 2132500 - DNA, 15 bp, Homo sapiens
cattgggaggtcttt

SEQ ID NO: 2132501 - DNA, 15 bp, Homo sapiens
attgggaggtctttc

SEQ ID NO: 2132502 - DNA, 15 bp, Homo sapiens
ttgggaggtctttca

SEQ ID NO: 2132503 - DNA, 15 bp, Homo sapiens
tgggaggtctttcat

SEQ ID NO: 2132504 - DNA, 15 bp, Homo sapiens
gggaggtctttcatt

SEQ ID NO: 2132505 - DNA, 15 bp, Homo sapiens
ggaggtctttcattt

SEQ ID NO: 2132506 - DNA, 15 bp, Homo sapiens
gaggtctttcatttg

SEQ ID NO: 2132507 - DNA, 15 bp, Homo sapiens
aggtctttcatttgg

SEQ ID NO: 2132508 - DNA, 15 bp, Homo sapiens
ggtctttcatttggc

SEQ ID NO: 2132509 - DNA, 15 bp, Homo sapiens
gtctttcatttggct

SEQ ID NO: 2132510 - DNA, 15 bp, Homo sapiens
tctttcatttggctt

SEQ ID NO: 2132511 - DNA, 15 bp, Homo sapiens
ctttcatttggcttt

SEQ ID NO: 2132512 - DNA, 15 bp, Homo sapiens
tttcatttggctttg

SEQ ID NO: 2132513 - DNA, 15 bp, Homo sapiens
ttcatttggctttga

SEQ ID NO: 2132514 - DNA, 15 bp, Homo sapiens
tcatttggctttgat

SEQ ID NO: 2132515 - DNA, 15 bp, Homo sapiens
catttggctttgata

SEQ ID NO: 2132516 - DNA, 15 bp, Homo sapiens
atttggctttgatat

SEQ ID NO: 2132517 - DNA, 15 bp, Homo sapiens
tttggctttgatata

SEQ ID NO: 2132518 - DNA, 15 bp, Homo sapiens
ttggctttgatataa

SEQ ID NO: 2132519 - DNA, 15 bp, Homo sapiens
tggctttgatataac

SEQ ID NO: 2132520 - DNA, 15 bp, Homo sapiens
ggctttgatataacc

SEQ ID NO: 2132521 - DNA, 15 bp, Homo sapiens
gctttgatataaccc

SEQ ID NO: 2132522 - DNA, 15 bp, Homo sapiens
ctttgatataacccc

SEQ ID NO: 2132523 - DNA, 15 bp, Homo sapiens
tttgatataacccca

SEQ ID NO: 2132524 - DNA, 15 bp, Homo sapiens
ttgatataaccccat

SEQ ID NO: 2132525 - DNA, 15 bp, Homo sapiens
tgatataaccccatg

SEQ ID NO: 2132526 - DNA, 15 bp, Homo sapiens
gatataaccccatga

SEQ ID NO: 2132527 - DNA, 15 bp, Homo sapiens
atataaccccatgaa

SEQ ID NO: 2132528 - DNA, 15 bp, Homo sapiens
tataaccccatgaat

SEQ ID NO: 2132529 - DNA, 15 bp, Homo sapiens
ataaccccatgaatg

SEQ ID NO: 2132530 - DNA, 15 bp, Homo sapiens
taaccccatgaatgt

SEQ ID NO: 2132531 - DNA, 15 bp, Homo sapiens
aaccccatgaatgtg

SEQ ID NO: 2132532 - DNA, 15 bp, Homo sapiens
accccatgaatgtgg

SEQ ID NO: 2132533 - DNA, 15 bp, Homo sapiens
ccccatgaatgtggg

SEQ ID NO: 2132534 - DNA, 15 bp, Homo sapiens
cccatgaatgtgggt

SEQ ID NO: 2132535 - DNA, 15 bp, Homo sapiens
ccatgaatgtgggtt

SEQ ID NO: 2132536 - DNA, 15 bp, Homo sapiens
catgaatgtgggttt

SEQ ID NO: 2132537 - DNA, 15 bp, Homo sapiens
atgaatgtgggtttt

SEQ ID NO: 2132538 - DNA, 15 bp, Homo sapiens
tgaatgtgggttttt

SEQ ID NO: 2132539 - DNA, 15 bp, Homo sapiens
gaatgtgggtttttt

SEQ ID NO: 2132540 - DNA, 15 bp, Homo sapiens
aatgtgggttttttg

SEQ ID NO: 2132541 - DNA, 15 bp, Homo sapiens
atgtgggttttttgt

SEQ ID NO: 2132542 - DNA, 15 bp, Homo sapiens
tgtgggttttttgtt

SEQ ID NO: 2132543 - DNA, 15 bp, Homo sapiens
gtgggttttttgttt

SEQ ID NO: 2132544 - DNA, 15 bp, Homo sapiens
tgggttttttgtttg

SEQ ID NO: 2132545 - DNA, 15 bp, Homo sapiens
gggttttttgtttga

SEQ ID NO: 2132546 - DNA, 15 bp, Homo sapiens
ggttttttgtttgag

SEQ ID NO: 2132547 - DNA, 15 bp, Homo sapiens
gttttttgtttgagc

SEQ ID NO: 2132548 - DNA, 15 bp, Homo sapiens
ttttttgtttgagca

SEQ ID NO: 2132549 - DNA, 15 bp, Homo sapiens
tttttgtttgagcac

SEQ ID NO: 2132550 - DNA, 15 bp, Homo sapiens
ttttgtttgagcact

SEQ ID NO: 2132551 - DNA, 15 bp, Homo sapiens
tttgtttgagcactt

SEQ ID NO: 2132552 - DNA, 15 bp, Homo sapiens
ttgtttgagcacttt

SEQ ID NO: 2132553 - DNA, 15 bp, Homo sapiens
tgtttgagcactttc

SEQ ID NO: 2132554 - DNA, 15 bp, Homo sapiens
gtttgagcactttct

SEQ ID NO: 2132555 - DNA, 15 bp, Homo sapiens
tttgagcactttctt

SEQ ID NO: 2132556 - DNA, 15 bp, Homo sapiens
ttgagcactttctta

SEQ ID NO: 2132557 - DNA, 15 bp, Homo sapiens
tgagcactttcttat

SEQ ID NO: 2132558 - DNA, 15 bp, Homo sapiens
gagcactttcttatt

SEQ ID NO: 2132559 - DNA, 15 bp, Homo sapiens
agcactttcttattt

SEQ ID NO: 2132560 - DNA, 15 bp, Homo sapiens
gcactttcttatttt

SEQ ID NO: 2132561 - DNA, 15 bp, Homo sapiens
cactttcttattttt

SEQ ID NO: 2132562 - DNA, 15 bp, Homo sapiens
actttcttatttttg

SEQ ID NO: 2132563 - DNA, 15 bp, Homo sapiens
ctttcttatttttgg

SEQ ID NO: 2132564 - DNA, 15 bp, Homo sapiens
tttcttatttttgga

SEQ ID NO: 2132565 - DNA, 15 bp, Homo sapiens
ttcttatttttggaa

SEQ ID NO: 2132566 - DNA, 15 bp, Homo sapiens
tcttatttttggaac

SEQ ID NO: 2132567 - DNA, 15 bp, Homo sapiens
cttatttttggaact

SEQ ID NO: 2132568 - DNA, 15 bp, Homo sapiens
ttatttttggaacta

SEQ ID NO: 2132569 - DNA, 15 bp, Homo sapiens
tatttttggaactac

SEQ ID NO: 2132570 - DNA, 15 bp, Homo sapiens
atttttggaactaca

SEQ ID NO: 2132571 - DNA, 15 bp, Homo sapiens
tttttggaactacaa

SEQ ID NO: 2132572 - DNA, 15 bp, Homo sapiens
ttttggaactacaac

SEQ ID NO: 2132573 - DNA, 15 bp, Homo sapiens
tttggaactacaaca

SEQ ID NO: 2132574 - DNA, 15 bp, Homo sapiens
ttggaactacaacat

SEQ ID NO: 2132575 - DNA, 15 bp, Homo sapiens
tggaactacaacatg

SEQ ID NO: 2132576 - DNA, 15 bp, Homo sapiens
ggaactacaacatgc

SEQ ID NO: 2132577 - DNA, 15 bp, Homo sapiens
gaactacaacatgct

SEQ ID NO: 2132578 - DNA, 15 bp, Homo sapiens
aactacaacatgctt

SEQ ID NO: 2132579 - DNA, 15 bp, Homo sapiens
actacaacatgcttc

SEQ ID NO: 2132580 - DNA, 15 bp, Homo sapiens
ctacaacatgcttca

SEQ ID NO: 2132581 - DNA, 15 bp, Homo sapiens
tacaacatgcttcag

SEQ ID NO: 2132582 - DNA, 15 bp, Homo sapiens
acaacatgcttcaga

SEQ ID NO: 2132583 - DNA, 15 bp, Homo sapiens
caacatgcttcagac

SEQ ID NO: 2132584 - DNA, 15 bp, Homo sapiens
aacatgcttcagact

SEQ ID NO: 2132585 - DNA, 15 bp, Homo sapiens
acatgcttcagactc

SEQ ID NO: 2132586 - DNA, 15 bp, Homo sapiens
catgcttcagactca

SEQ ID NO: 2132587 - DNA, 15 bp, Homo sapiens
atgcttcagactcat

SEQ ID NO: 2132588 - DNA, 15 bp, Homo sapiens
tgcttcagactcatt

SEQ ID NO: 2132589 - DNA, 15 bp, Homo sapiens
gcttcagactcattt

SEQ ID NO: 2132590 - DNA, 15 bp, Homo sapiens
cttcagactcatttg

SEQ ID NO: 2132591 - DNA, 15 bp, Homo sapiens
ttcagactcatttgc

SEQ ID NO: 2132592 - DNA, 15 bp, Homo sapiens
tcagactcatttgca

SEQ ID NO: 2132593 - DNA, 15 bp, Homo sapiens
cagactcatttgcat

SEQ ID NO: 2132594 - DNA, 15 bp, Homo sapiens
agactcatttgcata

SEQ ID NO: 2132595 - DNA, 15 bp, Homo sapiens
gactcatttgcatat

SEQ ID NO: 2132596 - DNA, 15 bp, Homo sapiens
actcatttgcatatc

SEQ ID NO: 2132597 - DNA, 15 bp, Homo sapiens
ctcatttgcatatct

SEQ ID NO: 2132598 - DNA, 15 bp, Homo sapiens
tcatttgcatatctc

SEQ ID NO: 2132599 - DNA, 15 bp, Homo sapiens
catttgcatatctcc

SEQ ID NO: 2132600 - DNA, 15 bp, Homo sapiens
atttgcatatctcct

SEQ ID NO: 2132601 - DNA, 15 bp, Homo sapiens
tttgcatatctcctg

SEQ ID NO: 2132602 - DNA, 15 bp, Homo sapiens
ttgcatatctcctgc

SEQ ID NO: 2132603 - DNA, 15 bp, Homo sapiens
tgcatatctcctgcc

SEQ ID NO: 2132604 - DNA, 15 bp, Homo sapiens
gcatatctcctgcct

SEQ ID NO: 2132605 - DNA, 15 bp, Homo sapiens
catatctcctgcctg

SEQ ID NO: 2132606 - DNA, 15 bp, Homo sapiens
atatctcctgcctgg

SEQ ID NO: 2132607 - DNA, 15 bp, Homo sapiens
tatctcctgcctgga

SEQ ID NO: 2132608 - DNA, 15 bp, Homo sapiens
atctcctgcctggac

SEQ ID NO: 2132609 - DNA, 15 bp, Homo sapiens
tctcctgcctggacc

SEQ ID NO: 2132610 - DNA, 15 bp, Homo sapiens
ctcctgcctggacct

SEQ ID NO: 2132611 - DNA, 15 bp, Homo sapiens
tcctgcctggaccta

SEQ ID NO: 2132612 - DNA, 15 bp, Homo sapiens
cctgcctggacctaa

SEQ ID NO: 2132613 - DNA, 15 bp, Homo sapiens
ctgcctggacctaaa

SEQ ID NO: 2132614 - DNA, 15 bp, Homo sapiens
tgcctggacctaaaa

SEQ ID NO: 2132615 - DNA, 15 bp, Homo sapiens
gcctggacctaaaat

SEQ ID NO: 2132616 - DNA, 15 bp, Homo sapiens
cctggacctaaaatg

SEQ ID NO: 2132617 - DNA, 15 bp, Homo sapiens
ctggacctaaaatga

SEQ ID NO: 2132618 - DNA, 15 bp, Homo sapiens
tggacctaaaatgat

SEQ ID NO: 2132619 - DNA, 15 bp, Homo sapiens
ggacctaaaatgatg

SEQ ID NO: 2132620 - DNA, 15 bp, Homo sapiens
gacctaaaatgatgt

SEQ ID NO: 2132621 - DNA, 15 bp, Homo sapiens
acctaaaatgatgta

SEQ ID NO: 2132622 - DNA, 15 bp, Homo sapiens
cctaaaatgatgtat

SEQ ID NO: 2132623 - DNA, 15 bp, Homo sapiens
ctaaaatgatgtatt

SEQ ID NO: 2132624 - DNA, 15 bp, Homo sapiens
taaaatgatgtattt

SEQ ID NO: 2132625 - DNA, 15 bp, Homo sapiens
aaaatgatgtatttc

SEQ ID NO: 2132626 - DNA, 15 bp, Homo sapiens
aaatgatgtatttct

SEQ ID NO: 2132627 - DNA, 15 bp, Homo sapiens
aatgatgtatttctg

SEQ ID NO: 2132628 - DNA, 15 bp, Homo sapiens
atgatgtatttctgc

SEQ ID NO: 2132629 - DNA, 15 bp, Homo sapiens
tgatgtatttctgca

SEQ ID NO: 2132630 - DNA, 15 bp, Homo sapiens
gatgtatttctgcaa

SEQ ID NO: 2132631 - DNA, 15 bp, Homo sapiens
atgtatttctgcaag

SEQ ID NO: 2132632 - DNA, 15 bp, Homo sapiens
tgtatttctgcaagg

SEQ ID NO: 2132633 - DNA, 15 bp, Homo sapiens
gtatttctgcaagga

SEQ ID NO: 2132634 - DNA, 15 bp, Homo sapiens
tatttctgcaaggag

SEQ ID NO: 2132635 - DNA, 15 bp, Homo sapiens
atttctgcaaggagc

SEQ ID NO: 2132636 - DNA, 15 bp, Homo sapiens
tttctgcaaggagcc

SEQ ID NO: 2132637 - DNA, 15 bp, Homo sapiens
ttctgcaaggagcct

SEQ ID NO: 2132638 - DNA, 15 bp, Homo sapiens
tctgcaaggagcctt

SEQ ID NO: 2132639 - DNA, 15 bp, Homo sapiens
ctgcaaggagccttg

SEQ ID NO: 2132640 - DNA, 15 bp, Homo sapiens
tgcaaggagccttga

SEQ ID NO: 2132641 - DNA, 15 bp, Homo sapiens
gcaaggagccttgat

SEQ ID NO: 2132642 - DNA, 15 bp, Homo sapiens
caaggagccttgata

SEQ ID NO: 2132643 - DNA, 15 bp, Homo sapiens
aaggagccttgatac

SEQ ID NO: 2132644 - DNA, 15 bp, Homo sapiens
aggagccttgatact

SEQ ID NO: 2132645 - DNA, 15 bp, Homo sapiens
ggagccttgatactt

SEQ ID NO: 2132646 - DNA, 15 bp, Homo sapiens
gagccttgatacttt

SEQ ID NO: 2132647 - DNA, 15 bp, Homo sapiens
agccttgatactttt

SEQ ID NO: 2132648 - DNA, 15 bp, Homo sapiens
gccttgatacttttt

SEQ ID NO: 2132649 - DNA, 15 bp, Homo sapiens
ccttgatacttttta

SEQ ID NO: 2132650 - DNA, 15 bp, Homo sapiens
cttgatactttttat

SEQ ID NO: 2132651 - DNA, 15 bp, Homo sapiens
ttgatactttttatt

SEQ ID NO: 2132652 - DNA, 15 bp, Homo sapiens
tgatactttttattg

SEQ ID NO: 2132653 - DNA, 15 bp, Homo sapiens
gatactttttattgg

SEQ ID NO: 2132654 - DNA, 15 bp, Homo sapiens
atactttttattgga

SEQ ID NO: 2132655 - DNA, 15 bp, Homo sapiens
tactttttattggag

SEQ ID NO: 2132656 - DNA, 15 bp, Homo sapiens
actttttattggaga

SEQ ID NO: 2132657 - DNA, 15 bp, Homo sapiens
ctttttattggagag

SEQ ID NO: 2132658 - DNA, 15 bp, Homo sapiens
tttttattggagagt

SEQ ID NO: 2132659 - DNA, 15 bp, Homo sapiens
ttttattggagagta

SEQ ID NO: 2132660 - DNA, 15 bp, Homo sapiens
tttattggagagtaa

SEQ ID NO: 2132661 - DNA, 15 bp, Homo sapiens
ttattggagagtaat

SEQ ID NO: 2132662 - DNA, 15 bp, Homo sapiens
tattggagagtaata

SEQ ID NO: 2132663 - DNA, 15 bp, Homo sapiens
attggagagtaatat

SEQ ID NO: 2132664 - DNA, 15 bp, Homo sapiens
ttggagagtaatatt

SEQ ID NO: 2132665 - DNA, 15 bp, Homo sapiens
tggagagtaatatta

SEQ ID NO: 2132666 - DNA, 15 bp, Homo sapiens
ggagagtaatattag

SEQ ID NO: 2132667 - DNA, 15 bp, Homo sapiens
gagagtaatattaga

SEQ ID NO: 2132668 - DNA, 15 bp, Homo sapiens
agagtaatattagaa

SEQ ID NO: 2132669 - DNA, 15 bp, Homo sapiens
gagtaatattagaaa

SEQ ID NO: 2132670 - DNA, 15 bp, Homo sapiens
agtaatattagaaat

SEQ ID NO: 2132671 - DNA, 15 bp, Homo sapiens
gtaatattagaaatc

SEQ ID NO: 2132672 - DNA, 15 bp, Homo sapiens
taatattagaaatca

SEQ ID NO: 2132673 - DNA, 15 bp, Homo sapiens
aatattagaaatcaa

SEQ ID NO: 2132674 - DNA, 15 bp, Homo sapiens
atattagaaatcaag

SEQ ID NO: 2132675 - DNA, 15 bp, Homo sapiens
tattagaaatcaaga

SEQ ID NO: 2132676 - DNA, 15 bp, Homo sapiens
attagaaatcaagaa

SEQ ID NO: 2132677 - DNA, 15 bp, Homo sapiens
ttagaaatcaagaag

SEQ ID NO: 2132678 - DNA, 15 bp, Homo sapiens
tagaaatcaagaagt

SEQ ID NO: 2132679 - DNA, 15 bp, Homo sapiens
agaaatcaagaagtg

SEQ ID NO: 2132680 - DNA, 15 bp, Homo sapiens
gaaatcaagaagtga

SEQ ID NO: 2132681 - DNA, 15 bp, Homo sapiens
aaatcaagaagtgaa

SEQ ID NO: 2132682 - DNA, 15 bp, Homo sapiens
aatcaagaagtgaat

SEQ ID NO: 2132683 - DNA, 15 bp, Homo sapiens
atcaagaagtgaatg

SEQ ID NO: 2132684 - DNA, 15 bp, Homo sapiens
tcaagaagtgaatgc

SEQ ID NO: 2132685 - DNA, 15 bp, Homo sapiens
caagaagtgaatgct

SEQ ID NO: 2132686 - DNA, 15 bp, Homo sapiens
aagaagtgaatgcta

SEQ ID NO: 2132687 - DNA, 15 bp, Homo sapiens
agaagtgaatgctag

SEQ ID NO: 2132688 - DNA, 15 bp, Homo sapiens
aagtgaatgctaggt

SEQ ID NO: 2132689 - DNA, 15 bp, Homo sapiens
agtgaatgctaggtg

SEQ ID NO: 2132690 - DNA, 15 bp, Homo sapiens
gtgaatgctaggtgc

SEQ ID NO: 2132691 - DNA, 15 bp, Homo sapiens
tgaatgctaggtgcg

SEQ ID NO: 2132692 - DNA, 15 bp, Homo sapiens
gaatgctaggtgcgc

SEQ ID NO: 2132693 - DNA, 15 bp, Homo sapiens
aatgctaggtgcgct

SEQ ID NO: 2132694 - DNA, 15 bp, Homo sapiens
atgctaggtgcgctc

SEQ ID NO: 2132695 - DNA, 15 bp, Homo sapiens
tgctaggtgcgctca

SEQ ID NO: 2132696 - DNA, 15 bp, Homo sapiens
gctaggtgcgctcat

SEQ ID NO: 2132697 - DNA, 15 bp, Homo sapiens
ctaggtgcgctcatt

SEQ ID NO: 2132698 - DNA, 15 bp, Homo sapiens
taggtgcgctcatta

SEQ ID NO: 2132699 - DNA, 15 bp, Homo sapiens
aggtgcgctcattac

SEQ ID NO: 2132700 - DNA, 15 bp, Homo sapiens
ggtgcgctcattact

SEQ ID NO: 2132701 - DNA, 15 bp, Homo sapiens
gtgcgctcattacta

SEQ ID NO: 2132702 - DNA, 15 bp, Homo sapiens
tgcgctcattactac

SEQ ID NO: 2132703 - DNA, 15 bp, Homo sapiens
gcgctcattactact

SEQ ID NO: 2132704 - DNA, 15 bp, Homo sapiens
cgctcattactactg

SEQ ID NO: 2132705 - DNA, 15 bp, Homo sapiens
gctcattactactgg

SEQ ID NO: 2132706 - DNA, 15 bp, Homo sapiens
ctcattactactgga

SEQ ID NO: 2132707 - DNA, 15 bp, Homo sapiens
tcattactactggag

SEQ ID NO: 2132708 - DNA, 15 bp, Homo sapiens
cattactactggagt

SEQ ID NO: 2132709 - DNA, 15 bp, Homo sapiens
attactactggagtg

SEQ ID NO: 2132710 - DNA, 15 bp, Homo sapiens
ttactactggagtgt

SEQ ID NO: 2132711 - DNA, 15 bp, Homo sapiens
tactactggagtgtc

SEQ ID NO: 2132712 - DNA, 15 bp, Homo sapiens
actactggagtgtca

SEQ ID NO: 2132713 - DNA, 15 bp, Homo sapiens
ctactggagtgtcat

SEQ ID NO: 2132714 - DNA, 15 bp, Homo sapiens
tactggagtgtcatt

SEQ ID NO: 2132715 - DNA, 15 bp, Homo sapiens
actggagtgtcattc

SEQ ID NO: 2132716 - DNA, 15 bp, Homo sapiens
ctggagtgtcattcc

SEQ ID NO: 2132717 - DNA, 15 bp, Homo sapiens
tggagtgtcattcct

SEQ ID NO: 2132718 - DNA, 15 bp, Homo sapiens
ggagtgtcattcctt

SEQ ID NO: 2132719 - DNA, 15 bp, Homo sapiens
gagtgtcattccttc

SEQ ID NO: 2132720 - DNA, 15 bp, Homo sapiens
agtgtcattccttca

SEQ ID NO: 2132721 - DNA, 15 bp, Homo sapiens
gtgtcattccttcaa

SEQ ID NO: 2132722 - DNA, 15 bp, Homo sapiens
tgtcattccttcaag

SEQ ID NO: 2132723 - DNA, 15 bp, Homo sapiens
gtcattccttcaaga

SEQ ID NO: 2132724 - DNA, 15 bp, Homo sapiens
tcattccttcaagac

SEQ ID NO: 2132725 - DNA, 15 bp, Homo sapiens
cattccttcaagacc

SEQ ID NO: 2132726 - DNA, 15 bp, Homo sapiens
attccttcaagacct

SEQ ID NO: 2132727 - DNA, 15 bp, Homo sapiens
ttccttcaagacctt

SEQ ID NO: 2132728 - DNA, 15 bp, Homo sapiens
tccttcaagaccttt

SEQ ID NO: 2132729 - DNA, 15 bp, Homo sapiens
ccttcaagacctttt

SEQ ID NO: 2132730 - DNA, 15 bp, Homo sapiens
cttcaagaccttttc

SEQ ID NO: 2132731 - DNA, 15 bp, Homo sapiens
ttcaagaccttttca

SEQ ID NO: 2132732 - DNA, 15 bp, Homo sapiens
tcaagaccttttcag

SEQ ID NO: 2132733 - DNA, 15 bp, Homo sapiens
caagaccttttcagt

SEQ ID NO: 2132734 - DNA, 15 bp, Homo sapiens
aagaccttttcagtt

SEQ ID NO: 2132735 - DNA, 15 bp, Homo sapiens
agaccttttcagttg

SEQ ID NO: 2132736 - DNA, 15 bp, Homo sapiens
gaccttttcagttga

SEQ ID NO: 2132737 - DNA, 15 bp, Homo sapiens
accttttcagttgac

SEQ ID NO: 2132738 - DNA, 15 bp, Homo sapiens
ccttttcagttgaca

SEQ ID NO: 2132739 - DNA, 15 bp, Homo sapiens
cttttcagttgacaa

SEQ ID NO: 2132740 - DNA, 15 bp, Homo sapiens
ttttcagttgacaag

SEQ ID NO: 2132741 - DNA, 15 bp, Homo sapiens
tttcagttgacaaga

SEQ ID NO: 2132742 - DNA, 15 bp, Homo sapiens
ttcagttgacaagag

SEQ ID NO: 2132743 - DNA, 15 bp, Homo sapiens
tcagttgacaagagc

SEQ ID NO: 2132744 - DNA, 15 bp, Homo sapiens
cagttgacaagagca

SEQ ID NO: 2132745 - DNA, 15 bp, Homo sapiens
agttgacaagagcaa

SEQ ID NO: 2132746 - DNA, 15 bp, Homo sapiens
gttgacaagagcaag

SEQ ID NO: 2132747 - DNA, 15 bp, Homo sapiens
ttgacaagagcaagg

SEQ ID NO: 2132748 - DNA, 15 bp, Homo sapiens
tgacaagagcaagga

SEQ ID NO: 2132749 - DNA, 15 bp, Homo sapiens
gacaagagcaaggag

SEQ ID NO: 2132750 - DNA, 15 bp, Homo sapiens
acaagagcaaggaga

SEQ ID NO: 2132751 - DNA, 15 bp, Homo sapiens
caagagcaaggagat

SEQ ID NO: 2132752 - DNA, 15 bp, Homo sapiens
aagagcaaggagata

SEQ ID NO: 2132753 - DNA, 15 bp, Homo sapiens
agagcaaggagatat

SEQ ID NO: 2132754 - DNA, 15 bp, Homo sapiens
gagcaaggagatata

SEQ ID NO: 2132755 - DNA, 15 bp, Homo sapiens
agcaaggagatatat

SEQ ID NO: 2132756 - DNA, 15 bp, Homo sapiens
gcaaggagatatata

SEQ ID NO: 2132757 - DNA, 15 bp, Homo sapiens
caaggagatatatat

SEQ ID NO: 2132758 - DNA, 15 bp, Homo sapiens
aaggagatatatatt

SEQ ID NO: 2132759 - DNA, 15 bp, Homo sapiens
aggagatatatattt

SEQ ID NO: 2132760 - DNA, 15 bp, Homo sapiens
ggagatatatatttg

SEQ ID NO: 2132761 - DNA, 15 bp, Homo sapiens
gagatatatatttgc

SEQ ID NO: 2132762 - DNA, 15 bp, Homo sapiens
agatatatatttgca

SEQ ID NO: 2132763 - DNA, 15 bp, Homo sapiens
gatatatatttgcat

SEQ ID NO: 2132764 - DNA, 15 bp, Homo sapiens
atatatatttgcatt

SEQ ID NO: 2132765 - DNA, 15 bp, Homo sapiens
tatatatttgcattc

SEQ ID NO: 2132766 - DNA, 15 bp, Homo sapiens
atatatttgcattct

SEQ ID NO: 2132767 - DNA, 15 bp, Homo sapiens
tatatttgcattcta

SEQ ID NO: 2132768 - DNA, 15 bp, Homo sapiens
atatttgcattctaa

SEQ ID NO: 2132769 - DNA, 15 bp, Homo sapiens
tatttgcattctaac

SEQ ID NO: 2132770 - DNA, 15 bp, Homo sapiens
atttgcattctaacg

SEQ ID NO: 2132771 - DNA, 15 bp, Homo sapiens
tttgcattctaacgt

SEQ ID NO: 2132772 - DNA, 15 bp, Homo sapiens
ttgcattctaacgtg

SEQ ID NO: 2132773 - DNA, 15 bp, Homo sapiens
tgcattctaacgtgt

SEQ ID NO: 2132774 - DNA, 15 bp, Homo sapiens
gcattctaacgtgtg

SEQ ID NO: 2132775 - DNA, 15 bp, Homo sapiens
cattctaacgtgtgt

SEQ ID NO: 2132776 - DNA, 15 bp, Homo sapiens
attctaacgtgtgta

SEQ ID NO: 2132777 - DNA, 15 bp, Homo sapiens
ttctaacgtgtgtat

SEQ ID NO: 2132778 - DNA, 15 bp, Homo sapiens
tctaacgtgtgtata

SEQ ID NO: 2132779 - DNA, 15 bp, Homo sapiens
ctaacgtgtgtatat

SEQ ID NO: 2132780 - DNA, 15 bp, Homo sapiens
taacgtgtgtatatg

SEQ ID NO: 2132781 - DNA, 15 bp, Homo sapiens
aacgtgtgtatatgc

SEQ ID NO: 2132782 - DNA, 15 bp, Homo sapiens
acgtgtgtatatgca

SEQ ID NO: 2132783 - DNA, 15 bp, Homo sapiens
cgtgtgtatatgcac

SEQ ID NO: 2132784 - DNA, 15 bp, Homo sapiens
gtgtgtatatgcaca

SEQ ID NO: 2132785 - DNA, 15 bp, Homo sapiens
tgtgtatatgcacat

SEQ ID NO: 2132786 - DNA, 15 bp, Homo sapiens
gtgtatatgcacata

SEQ ID NO: 2132787 - DNA, 15 bp, Homo sapiens
tgtatatgcacatag

SEQ ID NO: 2132788 - DNA, 15 bp, Homo sapiens
gtatatgcacatagc

SEQ ID NO: 2132789 - DNA, 15 bp, Homo sapiens
tatatgcacatagct

SEQ ID NO: 2132790 - DNA, 15 bp, Homo sapiens
atatgcacatagcta

SEQ ID NO: 2132791 - DNA, 15 bp, Homo sapiens
tatgcacatagctat

SEQ ID NO: 2132792 - DNA, 15 bp, Homo sapiens
atgcacatagctata

SEQ ID NO: 2132793 - DNA, 15 bp, Homo sapiens
tgcacatagctataa

SEQ ID NO: 2132794 - DNA, 15 bp, Homo sapiens
gcacatagctataaa

SEQ ID NO: 2132795 - DNA, 15 bp, Homo sapiens
cacatagctataaat

SEQ ID NO: 2132796 - DNA, 15 bp, Homo sapiens
acatagctataaata

SEQ ID NO: 2132797 - DNA, 15 bp, Homo sapiens
catagctataaatat

SEQ ID NO: 2132798 - DNA, 15 bp, Homo sapiens
atagctataaatata

SEQ ID NO: 2132799 - DNA, 15 bp, Homo sapiens
tagctataaatatat

SEQ ID NO: 2132800 - DNA, 15 bp, Homo sapiens
agctataaatatata

SEQ ID NO: 2132801 - DNA, 15 bp, Homo sapiens
gctataaatatatat

SEQ ID NO: 2132802 - DNA, 15 bp, Homo sapiens
ctataaatatatata

SEQ ID NO: 2132803 - DNA, 15 bp, Homo sapiens
tataaatatatataa

SEQ ID NO: 2132804 - DNA, 15 bp, Homo sapiens
ataaatatatataac

SEQ ID NO: 2132805 - DNA, 15 bp, Homo sapiens
taaatatatataacc

SEQ ID NO: 2132806 - DNA, 15 bp, Homo sapiens
aaatatatataacca

SEQ ID NO: 2132807 - DNA, 15 bp, Homo sapiens
aatatatataaccat

SEQ ID NO: 2132808 - DNA, 15 bp, Homo sapiens
atatatataaccatc

SEQ ID NO: 2132809 - DNA, 15 bp, Homo sapiens
tatatataaccatct

SEQ ID NO: 2132810 - DNA, 15 bp, Homo sapiens
atatataaccatctg

SEQ ID NO: 2132811 - DNA, 15 bp, Homo sapiens
tatataaccatctgt

SEQ ID NO: 2132812 - DNA, 15 bp, Homo sapiens
atataaccatctgta

SEQ ID NO: 2132813 - DNA, 15 bp, Homo sapiens
tataaccatctgtat

SEQ ID NO: 2132814 - DNA, 15 bp, Homo sapiens
ataaccatctgtatc

SEQ ID NO: 2132815 - DNA, 15 bp, Homo sapiens
taaccatctgtatct

SEQ ID NO: 2132816 - DNA, 15 bp, Homo sapiens
aaccatctgtatcta

SEQ ID NO: 2132817 - DNA, 15 bp, Homo sapiens
accatctgtatctat

SEQ ID NO: 2132818 - DNA, 15 bp, Homo sapiens
ccatctgtatctata

SEQ ID NO: 2132819 - DNA, 15 bp, Homo sapiens
catctgtatctatat

SEQ ID NO: 2132820 - DNA, 15 bp, Homo sapiens
atctgtatctatatt

SEQ ID NO: 2132821 - DNA, 15 bp, Homo sapiens
tctgtatctatatta

SEQ ID NO: 2132822 - DNA, 15 bp, Homo sapiens
ctgtatctatattaa

SEQ ID NO: 2132823 - DNA, 15 bp, Homo sapiens
tgtatctatattaaa

SEQ ID NO: 2132824 - DNA, 15 bp, Homo sapiens
gtatctatattaaac

SEQ ID NO: 2132825 - DNA, 15 bp, Homo sapiens
tatctatattaaact

SEQ ID NO: 2132826 - DNA, 15 bp, Homo sapiens
atctatattaaacta

SEQ ID NO: 2132827 - DNA, 15 bp, Homo sapiens
tctatattaaactaa

SEQ ID NO: 2132828 - DNA, 15 bp, Homo sapiens
ctatattaaactaaa

SEQ ID NO: 2132829 - DNA, 15 bp, Homo sapiens
tatattaaactaaat

SEQ ID NO: 2132830 - DNA, 15 bp, Homo sapiens
atattaaactaaatg

SEQ ID NO: 2132831 - DNA, 15 bp, Homo sapiens
tattaaactaaatgt

SEQ ID NO: 2132832 - DNA, 15 bp, Homo sapiens
attaaactaaatgtg

SEQ ID NO: 2132833 - DNA, 15 bp, Homo sapiens
ttaaactaaatgtgt

SEQ ID NO: 2132834 - DNA, 15 bp, Homo sapiens
taaactaaatgtgtt

SEQ ID NO: 2132835 - DNA, 15 bp, Homo sapiens
aaactaaatgtgttt

SEQ ID NO: 2132836 - DNA, 15 bp, Homo sapiens
aactaaatgtgttta

SEQ ID NO: 2132837 - DNA, 15 bp, Homo sapiens
actaaatgtgtttat

SEQ ID NO: 2132838 - DNA, 15 bp, Homo sapiens
ctaaatgtgtttata

SEQ ID NO: 2132839 - DNA, 15 bp, Homo sapiens
taaatgtgtttatac

SEQ ID NO: 2132840 - DNA, 15 bp, Homo sapiens
aaatgtgtttatacc

SEQ ID NO: 2132841 - DNA, 15 bp, Homo sapiens
aatgtgtttatacct

SEQ ID NO: 2132842 - DNA, 15 bp, Homo sapiens
atgtgtttataccta

SEQ ID NO: 2132843 - DNA, 15 bp, Homo sapiens
tgtgtttatacctac

SEQ ID NO: 2132844 - DNA, 15 bp, Homo sapiens
gtgtttatacctacg

SEQ ID NO: 2132845 - DNA, 15 bp, Homo sapiens
tgtttatacctacgt

SEQ ID NO: 2132846 - DNA, 15 bp, Homo sapiens
gtttatacctacgtc

SEQ ID NO: 2132847 - DNA, 15 bp, Homo sapiens
tttatacctacgtct

SEQ ID NO: 2132848 - DNA, 15 bp, Homo sapiens
ttatacctacgtctc

SEQ ID NO: 2132849 - DNA, 15 bp, Homo sapiens
tatacctacgtctcc

SEQ ID NO: 2132850 - DNA, 15 bp, Homo sapiens
atacctacgtctcca

SEQ ID NO: 2132851 - DNA, 15 bp, Homo sapiens
tacctacgtctccaa

SEQ ID NO: 2132852 - DNA, 15 bp, Homo sapiens
acctacgtctccaac

SEQ ID NO: 2132853 - DNA, 15 bp, Homo sapiens
cctacgtctccaact

SEQ ID NO: 2132854 - DNA, 15 bp, Homo sapiens
ctacgtctccaactc

SEQ ID NO: 2132855 - DNA, 15 bp, Homo sapiens
tacgtctccaactct

SEQ ID NO: 2132856 - DNA, 15 bp, Homo sapiens
acgtctccaactcta

SEQ ID NO: 2132857 - DNA, 15 bp, Homo sapiens
cgtctccaactctaa

SEQ ID NO: 2132858 - DNA, 15 bp, Homo sapiens
gtctccaactctaat

SEQ ID NO: 2132859 - DNA, 15 bp, Homo sapiens
tctccaactctaatc

SEQ ID NO: 2132860 - DNA, 15 bp, Homo sapiens
ctccaactctaatca

SEQ ID NO: 2132861 - DNA, 15 bp, Homo sapiens
tccaactctaatcat

SEQ ID NO: 2132862 - DNA, 15 bp, Homo sapiens
ccaactctaatcatt

SEQ ID NO: 2132863 - DNA, 15 bp, Homo sapiens
caactctaatcattg

SEQ ID NO: 2132864 - DNA, 15 bp, Homo sapiens
aactctaatcattgc

SEQ ID NO: 2132865 - DNA, 15 bp, Homo sapiens
actctaatcattgcc

SEQ ID NO: 2132866 - DNA, 15 bp, Homo sapiens
ctctaatcattgcca

SEQ ID NO: 2132867 - DNA, 15 bp, Homo sapiens
tctaatcattgccac

SEQ ID NO: 2132868 - DNA, 15 bp, Homo sapiens
ctaatcattgccaca

SEQ ID NO: 2132869 - DNA, 15 bp, Homo sapiens
taatcattgccacat

SEQ ID NO: 2132870 - DNA, 15 bp, Homo sapiens
aatcattgccacatg

SEQ ID NO: 2132871 - DNA, 15 bp, Homo sapiens
atcattgccacatgg

SEQ ID NO: 2132872 - DNA, 15 bp, Homo sapiens
tcattgccacatgga

SEQ ID NO: 2132873 - DNA, 15 bp, Homo sapiens
cattgccacatggat

SEQ ID NO: 2132874 - DNA, 15 bp, Homo sapiens
attgccacatggatc

SEQ ID NO: 2132875 - DNA, 15 bp, Homo sapiens
ttgccacatggatca

SEQ ID NO: 2132876 - DNA, 15 bp, Homo sapiens
tgccacatggatcat

SEQ ID NO: 2132877 - DNA, 15 bp, Homo sapiens
gccacatggatcatt

SEQ ID NO: 2132878 - DNA, 15 bp, Homo sapiens
ccacatggatcatta

SEQ ID NO: 2132879 - DNA, 15 bp, Homo sapiens
cacatggatcattat

SEQ ID NO: 2132880 - DNA, 15 bp, Homo sapiens
acatggatcattata

SEQ ID NO: 2132881 - DNA, 15 bp, Homo sapiens
catggatcattatag

SEQ ID NO: 2132882 - DNA, 15 bp, Homo sapiens
atggatcattatagt

SEQ ID NO: 2132883 - DNA, 15 bp, Homo sapiens
tggatcattatagtc

SEQ ID NO: 2132884 - DNA, 15 bp, Homo sapiens
ggatcattatagtct

SEQ ID NO: 2132885 - DNA, 15 bp, Homo sapiens
gatcattatagtctc

SEQ ID NO: 2132886 - DNA, 15 bp, Homo sapiens
atcattatagtctca

SEQ ID NO: 2132887 - DNA, 15 bp, Homo sapiens
tcattatagtctcac

SEQ ID NO: 2132888 - DNA, 15 bp, Homo sapiens
cattatagtctcacc

SEQ ID NO: 2132889 - DNA, 15 bp, Homo sapiens
attatagtctcacct

SEQ ID NO: 2132890 - DNA, 15 bp, Homo sapiens
ttatagtctcacctc

SEQ ID NO: 2132891 - DNA, 15 bp, Homo sapiens
tatagtctcacctcc

SEQ ID NO: 2132892 - DNA, 15 bp, Homo sapiens
atagtctcacctcct

SEQ ID NO: 2132893 - DNA, 15 bp, Homo sapiens
tagtctcacctcctt

SEQ ID NO: 2132894 - DNA, 15 bp, Homo sapiens
agtctcacctccttg

SEQ ID NO: 2132895 - DNA, 15 bp, Homo sapiens
gtctcacctccttgc

SEQ ID NO: 2132896 - DNA, 15 bp, Homo sapiens
tctcacctccttgct

SEQ ID NO: 2132897 - DNA, 15 bp, Homo sapiens
ctcacctccttgctt

SEQ ID NO: 2132898 - DNA, 15 bp, Homo sapiens
tcacctccttgctta

SEQ ID NO: 2132899 - DNA, 15 bp, Homo sapiens
cacctccttgcttat

SEQ ID NO: 2132900 - DNA, 15 bp, Homo sapiens
acctccttgcttatc

SEQ ID NO: 2132901 - DNA, 15 bp, Homo sapiens
cctccttgcttatct

SEQ ID NO: 2132902 - DNA, 15 bp, Homo sapiens
ctccttgcttatctg

SEQ ID NO: 2132903 - DNA, 15 bp, Homo sapiens
tccttgcttatctgt

SEQ ID NO: 2132904 - DNA, 15 bp, Homo sapiens
ccttgcttatctgtt

SEQ ID NO: 2132905 - DNA, 15 bp, Homo sapiens
cttgcttatctgtta

SEQ ID NO: 2132906 - DNA, 15 bp, Homo sapiens
ttgcttatctgttac

SEQ ID NO: 2132907 - DNA, 15 bp, Homo sapiens
tgcttatctgttacc

SEQ ID NO: 2132908 - DNA, 15 bp, Homo sapiens
gcttatctgttacct

SEQ ID NO: 2132909 - DNA, 15 bp, Homo sapiens
cttatctgttacctc

SEQ ID NO: 2132910 - DNA, 15 bp, Homo sapiens
ttatctgttacctcc

SEQ ID NO: 2132911 - DNA, 15 bp, Homo sapiens
tatctgttacctccc

SEQ ID NO: 2132912 - DNA, 15 bp, Homo sapiens
atctgttacctccca

SEQ ID NO: 2132913 - DNA, 15 bp, Homo sapiens
tctgttacctcccat

SEQ ID NO: 2132914 - DNA, 15 bp, Homo sapiens
ctgttacctcccatt

SEQ ID NO: 2132915 - DNA, 15 bp, Homo sapiens
tgttacctcccattt

SEQ ID NO: 2132916 - DNA, 15 bp, Homo sapiens
gttacctcccatttc

SEQ ID NO: 2132917 - DNA, 15 bp, Homo sapiens
ttacctcccatttct

SEQ ID NO: 2132918 - DNA, 15 bp, Homo sapiens
tacctcccatttcta

SEQ ID NO: 2132919 - DNA, 15 bp, Homo sapiens
acctcccatttctac

SEQ ID NO: 2132920 - DNA, 15 bp, Homo sapiens
cctcccatttctaca

SEQ ID NO: 2132921 - DNA, 15 bp, Homo sapiens
ctcccatttctacag

SEQ ID NO: 2132922 - DNA, 15 bp, Homo sapiens
tcccatttctacagt

SEQ ID NO: 2132923 - DNA, 15 bp, Homo sapiens
cccatttctacagtg

SEQ ID NO: 2132924 - DNA, 15 bp, Homo sapiens
ccatttctacagtga

SEQ ID NO: 2132925 - DNA, 15 bp, Homo sapiens
catttctacagtgag

SEQ ID NO: 2132926 - DNA, 15 bp, Homo sapiens
atttctacagtgaga

SEQ ID NO: 2132927 - DNA, 15 bp, Homo sapiens
tttctacagtgagaa

SEQ ID NO: 2132928 - DNA, 15 bp, Homo sapiens
ttctacagtgagaaa

SEQ ID NO: 2132929 - DNA, 15 bp, Homo sapiens
tctacagtgagaaac

SEQ ID NO: 2132930 - DNA, 15 bp, Homo sapiens
ctacagtgagaaacc

SEQ ID NO: 2132931 - DNA, 15 bp, Homo sapiens
tacagtgagaaacct

SEQ ID NO: 2132932 - DNA, 15 bp, Homo sapiens
acagtgagaaacctg

SEQ ID NO: 2132933 - DNA, 15 bp, Homo sapiens
cagtgagaaacctgg

SEQ ID NO: 2132934 - DNA, 15 bp, Homo sapiens
agtgagaaacctggc

SEQ ID NO: 2132935 - DNA, 15 bp, Homo sapiens
gtgagaaacctggct

SEQ ID NO: 2132936 - DNA, 15 bp, Homo sapiens
tgagaaacctggctt

SEQ ID NO: 2132937 - DNA, 15 bp, Homo sapiens
gagaaacctggcttg

SEQ ID NO: 2132938 - DNA, 15 bp, Homo sapiens
agaaacctggcttgg

SEQ ID NO: 2132939 - DNA, 15 bp, Homo sapiens
gaaacctggcttggt

SEQ ID NO: 2132940 - DNA, 15 bp, Homo sapiens
aaacctggcttggtt

SEQ ID NO: 2132941 - DNA, 15 bp, Homo sapiens
aacctggcttggttg

SEQ ID NO: 2132942 - DNA, 15 bp, Homo sapiens
acctggcttggttgg

SEQ ID NO: 2132943 - DNA, 15 bp, Homo sapiens
cctggcttggttggg

SEQ ID NO: 2132944 - DNA, 15 bp, Homo sapiens
ctggcttggttggga

SEQ ID NO: 2132945 - DNA, 15 bp, Homo sapiens
tggcttggttgggaa

SEQ ID NO: 2132946 - DNA, 15 bp, Homo sapiens
ggcttggttgggaaa

SEQ ID NO: 2132947 - DNA, 15 bp, Homo sapiens
gcttggttgggaaat

SEQ ID NO: 2132948 - DNA, 15 bp, Homo sapiens
cttggttgggaaatt

SEQ ID NO: 2132949 - DNA, 15 bp, Homo sapiens
ttggttgggaaattt

SEQ ID NO: 2132950 - DNA, 15 bp, Homo sapiens
tggttgggaaatttt

SEQ ID NO: 2132951 - DNA, 15 bp, Homo sapiens
ggttgggaaattttt

SEQ ID NO: 2132952 - DNA, 15 bp, Homo sapiens
gttgggaaatttttc

SEQ ID NO: 2132953 - DNA, 15 bp, Homo sapiens
ttgggaaatttttct

SEQ ID NO: 2132954 - DNA, 15 bp, Homo sapiens
tgggaaatttttctg

SEQ ID NO: 2132955 - DNA, 15 bp, Homo sapiens
gggaaatttttctgt

SEQ ID NO: 2132956 - DNA, 15 bp, Homo sapiens
ggaaatttttctgtt

SEQ ID NO: 2132957 - DNA, 15 bp, Homo sapiens
gaaatttttctgtta

SEQ ID NO: 2132958 - DNA, 15 bp, Homo sapiens
aaatttttctgttaa

SEQ ID NO: 2132959 - DNA, 15 bp, Homo sapiens
aatttttctgttaat

SEQ ID NO: 2132960 - DNA, 15 bp, Homo sapiens
atttttctgttaata

SEQ ID NO: 2132961 - DNA, 15 bp, Homo sapiens
tttttctgttaatat

SEQ ID NO: 2132962 - DNA, 15 bp, Homo sapiens
ttttctgttaatatt

SEQ ID NO: 2132963 - DNA, 15 bp, Homo sapiens
tttctgttaatatta

SEQ ID NO: 2132964 - DNA, 15 bp, Homo sapiens
ttctgttaatattac

SEQ ID NO: 2132965 - DNA, 15 bp, Homo sapiens
tctgttaatattacg

SEQ ID NO: 2132966 - DNA, 15 bp, Homo sapiens
ctgttaatattacgg

SEQ ID NO: 2132967 - DNA, 15 bp, Homo sapiens
tgttaatattacggt

SEQ ID NO: 2132968 - DNA, 15 bp, Homo sapiens
gttaatattacggta

SEQ ID NO: 2132969 - DNA, 15 bp, Homo sapiens
ttaatattacggtag

SEQ ID NO: 2132970 - DNA, 15 bp, Homo sapiens
taatattacggtagt

SEQ ID NO: 2132971 - DNA, 15 bp, Homo sapiens
aatattacggtagtg

SEQ ID NO: 2132972 - DNA, 15 bp, Homo sapiens
atattacggtagtga

SEQ ID NO: 2132973 - DNA, 15 bp, Homo sapiens
tattacggtagtgag

SEQ ID NO: 2132974 - DNA, 15 bp, Homo sapiens
attacggtagtgagt

SEQ ID NO: 2132975 - DNA, 15 bp, Homo sapiens
ttacggtagtgagtg

SEQ ID NO: 2132976 - DNA, 15 bp, Homo sapiens
tacggtagtgagtgt

SEQ ID NO: 2132977 - DNA, 15 bp, Homo sapiens
acggtagtgagtgtt

SEQ ID NO: 2132978 - DNA, 15 bp, Homo sapiens
cggtagtgagtgttt

SEQ ID NO: 2132979 - DNA, 15 bp, Homo sapiens
ggtagtgagtgtttg

SEQ ID NO: 2132980 - DNA, 15 bp, Homo sapiens
gtagtgagtgtttga

SEQ ID NO: 2132981 - DNA, 15 bp, Homo sapiens
tagtgagtgtttgac

SEQ ID NO: 2132982 - DNA, 15 bp, Homo sapiens
agtgagtgtttgaca

SEQ ID NO: 2132983 - DNA, 15 bp, Homo sapiens
gtgagtgtttgacat

SEQ ID NO: 2132984 - DNA, 15 bp, Homo sapiens
tgagtgtttgacatt

SEQ ID NO: 2132985 - DNA, 15 bp, Homo sapiens
gagtgtttgacattt

SEQ ID NO: 2132986 - DNA, 15 bp, Homo sapiens
agtgtttgacatttg

SEQ ID NO: 2132987 - DNA, 15 bp, Homo sapiens
gtgtttgacatttgc

SEQ ID NO: 2132988 - DNA, 15 bp, Homo sapiens
tgtttgacatttgct

SEQ ID NO: 2132989 - DNA, 15 bp, Homo sapiens
gtttgacatttgctt

SEQ ID NO: 2132990 - DNA, 15 bp, Homo sapiens
tttgacatttgcttc

SEQ ID NO: 2132991 - DNA, 15 bp, Homo sapiens
ttgacatttgcttct

SEQ ID NO: 2132992 - DNA, 15 bp, Homo sapiens
tgacatttgcttcta

SEQ ID NO: 2132993 - DNA, 15 bp, Homo sapiens
gacatttgcttctat

SEQ ID NO: 2132994 - DNA, 15 bp, Homo sapiens
acatttgcttctatg

SEQ ID NO: 2132995 - DNA, 15 bp, Homo sapiens
catttgcttctatgg

SEQ ID NO: 2132996 - DNA, 15 bp, Homo sapiens
atttgcttctatggt

SEQ ID NO: 2132997 - DNA, 15 bp, Homo sapiens
tttgcttctatggtt

SEQ ID NO: 2132998 - DNA, 15 bp, Homo sapiens
ttgcttctatggtta

SEQ ID NO: 2132999 - DNA, 15 bp, Homo sapiens
tgcttctatggttaa

SEQ ID NO: 2133000 - DNA, 15 bp, Homo sapiens
gcttctatggttaag

SEQ ID NO: 2133001 - DNA, 15 bp, Homo sapiens
cttctatggttaagt

SEQ ID NO: 2133002 - DNA, 15 bp, Homo sapiens
ttctatggttaagtt

SEQ ID NO: 2133003 - DNA, 15 bp, Homo sapiens
tctatggttaagttt

SEQ ID NO: 2133004 - DNA, 15 bp, Homo sapiens
ctatggttaagttta

SEQ ID NO: 2133005 - DNA, 15 bp, Homo sapiens
tatggttaagtttag

SEQ ID NO: 2133006 - DNA, 15 bp, Homo sapiens
atggttaagtttagg

SEQ ID NO: 2133007 - DNA, 15 bp, Homo sapiens
tggttaagtttaggg

SEQ ID NO: 2133008 - DNA, 15 bp, Homo sapiens
ggttaagtttaggga

SEQ ID NO: 2133009 - DNA, 15 bp, Homo sapiens
gttaagtttagggag

SEQ ID NO: 2133010 - DNA, 15 bp, Homo sapiens
ttaagtttagggaga

SEQ ID NO: 2133011 - DNA, 15 bp, Homo sapiens
taagtttagggagag

SEQ ID NO: 2133012 - DNA, 15 bp, Homo sapiens
aagtttagggagagt

SEQ ID NO: 2133013 - DNA, 15 bp, Homo sapiens
agtttagggagagtt

SEQ ID NO: 2133014 - DNA, 15 bp, Homo sapiens
gtttagggagagttt

SEQ ID NO: 2133015 - DNA, 15 bp, Homo sapiens
tttagggagagttta

SEQ ID NO: 2133016 - DNA, 15 bp, Homo sapiens
ttagggagagtttag

SEQ ID NO: 2133017 - DNA, 15 bp, Homo sapiens
tagggagagtttagc

SEQ ID NO: 2133018 - DNA, 15 bp, Homo sapiens
agggagagtttagct

SEQ ID NO: 2133019 - DNA, 15 bp, Homo sapiens
gggagagtttagctg

SEQ ID NO: 2133020 - DNA, 15 bp, Homo sapiens
ggagagtttagctgt

SEQ ID NO: 2133021 - DNA, 15 bp, Homo sapiens
gagagtttagctgta

SEQ ID NO: 2133022 - DNA, 15 bp, Homo sapiens
agagtttagctgtag

SEQ ID NO: 2133023 - DNA, 15 bp, Homo sapiens
gagtttagctgtagg

SEQ ID NO: 2133024 - DNA, 15 bp, Homo sapiens
agtttagctgtaggg

SEQ ID NO: 2133025 - DNA, 15 bp, Homo sapiens
gtttagctgtagggt

SEQ ID NO: 2133026 - DNA, 15 bp, Homo sapiens
tttagctgtagggta

SEQ ID NO: 2133027 - DNA, 15 bp, Homo sapiens
ttagctgtagggtat

SEQ ID NO: 2133028 - DNA, 15 bp, Homo sapiens
tagctgtagggtatt

SEQ ID NO: 2133029 - DNA, 15 bp, Homo sapiens
agctgtagggtattc

SEQ ID NO: 2133030 - DNA, 15 bp, Homo sapiens
gctgtagggtattct

SEQ ID NO: 2133031 - DNA, 15 bp, Homo sapiens
ctgtagggtattctt

SEQ ID NO: 2133032 - DNA, 15 bp, Homo sapiens
tgtagggtattcttg

SEQ ID NO: 2133033 - DNA, 15 bp, Homo sapiens
gtagggtattcttga

SEQ ID NO: 2133034 - DNA, 15 bp, Homo sapiens
tagggtattcttgaa

SEQ ID NO: 2133035 - DNA, 15 bp, Homo sapiens
agggtattcttgaaa

SEQ ID NO: 2133036 - DNA, 15 bp, Homo sapiens
gggtattcttgaaac

SEQ ID NO: 2133037 - DNA, 15 bp, Homo sapiens
ggtattcttgaaact

SEQ ID NO: 2133038 - DNA, 15 bp, Homo sapiens
gtattcttgaaacta

SEQ ID NO: 2133039 - DNA, 15 bp, Homo sapiens
tattcttgaaactag

SEQ ID NO: 2133040 - DNA, 15 bp, Homo sapiens
attcttgaaactaga

SEQ ID NO: 2133041 - DNA, 15 bp, Homo sapiens
ttcttgaaactagaa

SEQ ID NO: 2133042 - DNA, 15 bp, Homo sapiens
tcttgaaactagaaa

SEQ ID NO: 2133043 - DNA, 15 bp, Homo sapiens
cttgaaactagaaat

SEQ ID NO: 2133044 - DNA, 15 bp, Homo sapiens
ttgaaactagaaatg

SEQ ID NO: 2133045 - DNA, 15 bp, Homo sapiens
tgaaactagaaatga

SEQ ID NO: 2133046 - DNA, 15 bp, Homo sapiens
gaaactagaaatgac

SEQ ID NO: 2133047 - DNA, 15 bp, Homo sapiens
aaactagaaatgacc

SEQ ID NO: 2133048 - DNA, 15 bp, Homo sapiens
aactagaaatgaccc

SEQ ID NO: 2133049 - DNA, 15 bp, Homo sapiens
actagaaatgaccct

SEQ ID NO: 2133050 - DNA, 15 bp, Homo sapiens
ctagaaatgaccctt

SEQ ID NO: 2133051 - DNA, 15 bp, Homo sapiens
tagaaatgacccttc

SEQ ID NO: 2133052 - DNA, 15 bp, Homo sapiens
agaaatgacccttct

SEQ ID NO: 2133053 - DNA, 15 bp, Homo sapiens
gaaatgacccttctg

SEQ ID NO: 2133054 - DNA, 15 bp, Homo sapiens
aaatgacccttctgc

SEQ ID NO: 2133055 - DNA, 15 bp, Homo sapiens
aatgacccttctgcc

SEQ ID NO: 2133056 - DNA, 15 bp, Homo sapiens
atgacccttctgccc

SEQ ID NO: 2133057 - DNA, 15 bp, Homo sapiens
tgacccttctgccct

SEQ ID NO: 2133058 - DNA, 15 bp, Homo sapiens
gacccttctgcccta

SEQ ID NO: 2133059 - DNA, 15 bp, Homo sapiens
acccttctgccctaa

SEQ ID NO: 2133060 - DNA, 15 bp, Homo sapiens
cccttctgccctaaa

SEQ ID NO: 2133061 - DNA, 15 bp, Homo sapiens
ccttctgccctaaat

SEQ ID NO: 2133062 - DNA, 15 bp, Homo sapiens
cttctgccctaaatg

SEQ ID NO: 2133063 - DNA, 15 bp, Homo sapiens
ttctgccctaaatgt

SEQ ID NO: 2133064 - DNA, 15 bp, Homo sapiens
tctgccctaaatgtt

SEQ ID NO: 2133065 - DNA, 15 bp, Homo sapiens
ctgccctaaatgttt

SEQ ID NO: 2133066 - DNA, 15 bp, Homo sapiens
tgccctaaatgtttc

SEQ ID NO: 2133067 - DNA, 15 bp, Homo sapiens
gccctaaatgtttct

SEQ ID NO: 2133068 - DNA, 15 bp, Homo sapiens
ccctaaatgtttctg

SEQ ID NO: 2133069 - DNA, 15 bp, Homo sapiens
cctaaatgtttctgc

SEQ ID NO: 2133070 - DNA, 15 bp, Homo sapiens
ctaaatgtttctgcc

SEQ ID NO: 2133071 - DNA, 15 bp, Homo sapiens
taaatgtttctgcca

SEQ ID NO: 2133072 - DNA, 15 bp, Homo sapiens
aaatgtttctgccag

SEQ ID NO: 2133073 - DNA, 15 bp, Homo sapiens
aatgtttctgccagt

SEQ ID NO: 2133074 - DNA, 15 bp, Homo sapiens
atgtttctgccagtt

SEQ ID NO: 2133075 - DNA, 15 bp, Homo sapiens
tgtttctgccagttt

SEQ ID NO: 2133076 - DNA, 15 bp, Homo sapiens
gtttctgccagtttt

SEQ ID NO: 2133077 - DNA, 15 bp, Homo sapiens
tttctgccagttttg

SEQ ID NO: 2133078 - DNA, 15 bp, Homo sapiens
ttctgccagttttga

SEQ ID NO: 2133079 - DNA, 15 bp, Homo sapiens
tctgccagttttgaa

SEQ ID NO: 2133080 - DNA, 15 bp, Homo sapiens
ctgccagttttgaaa

SEQ ID NO: 2133081 - DNA, 15 bp, Homo sapiens
tgccagttttgaaac

SEQ ID NO: 2133082 - DNA, 15 bp, Homo sapiens
gccagttttgaaacg

SEQ ID NO: 2133083 - DNA, 15 bp, Homo sapiens
ccagttttgaaacgt

SEQ ID NO: 2133084 - DNA, 15 bp, Homo sapiens
cagttttgaaacgta

SEQ ID NO: 2133085 - DNA, 15 bp, Homo sapiens
agttttgaaacgtaa

SEQ ID NO: 2133086 - DNA, 15 bp, Homo sapiens
gttttgaaacgtaaa

SEQ ID NO: 2133087 - DNA, 15 bp, Homo sapiens
ttttgaaacgtaaaa

SEQ ID NO: 2133088 - DNA, 15 bp, Homo sapiens
tttgaaacgtaaaat

SEQ ID NO: 2133089 - DNA, 15 bp, Homo sapiens
ttgaaacgtaaaata

SEQ ID NO: 2133090 - DNA, 15 bp, Homo sapiens
tgaaacgtaaaatag

SEQ ID NO: 2133091 - DNA, 15 bp, Homo sapiens
gaaacgtaaaatagg

SEQ ID NO: 2133092 - DNA, 15 bp, Homo sapiens
aaacgtaaaataggt

SEQ ID NO: 2133093 - DNA, 15 bp, Homo sapiens
aacgtaaaataggtt

SEQ ID NO: 2133094 - DNA, 15 bp, Homo sapiens
acgtaaaataggttg

SEQ ID NO: 2133095 - DNA, 15 bp, Homo sapiens
cgtaaaataggttgc

SEQ ID NO: 2133096 - DNA, 15 bp, Homo sapiens
gtaaaataggttgca

SEQ ID NO: 2133097 - DNA, 15 bp, Homo sapiens
taaaataggttgcag

SEQ ID NO: 2133098 - DNA, 15 bp, Homo sapiens
aaaataggttgcaga

SEQ ID NO: 2133099 - DNA, 15 bp, Homo sapiens
aaataggttgcagaa

SEQ ID NO: 2133100 - DNA, 15 bp, Homo sapiens
aataggttgcagaaa

SEQ ID NO: 2133101 - DNA, 15 bp, Homo sapiens
ataggttgcagaaac

SEQ ID NO: 2133102 - DNA, 15 bp, Homo sapiens
taggttgcagaaaca

SEQ ID NO: 2133103 - DNA, 15 bp, Homo sapiens
aggttgcagaaacaa

SEQ ID NO: 2133104 - DNA, 15 bp, Homo sapiens
ggttgcagaaacaaa

SEQ ID NO: 2133105 - DNA, 15 bp, Homo sapiens
gttgcagaaacaaac

SEQ ID NO: 2133106 - DNA, 15 bp, Homo sapiens
ttgcagaaacaaact

SEQ ID NO: 2133107 - DNA, 15 bp, Homo sapiens
tgcagaaacaaactt

SEQ ID NO: 2133108 - DNA, 15 bp, Homo sapiens
gcagaaacaaacttt

SEQ ID NO: 2133109 - DNA, 15 bp, Homo sapiens
cagaaacaaacttta

SEQ ID NO: 2133110 - DNA, 15 bp, Homo sapiens
agaaacaaactttat

SEQ ID NO: 2133111 - DNA, 15 bp, Homo sapiens
gaaacaaactttatc

SEQ ID NO: 2133112 - DNA, 15 bp, Homo sapiens
aaacaaactttatct

SEQ ID NO: 2133113 - DNA, 15 bp, Homo sapiens
aacaaactttatctt

SEQ ID NO: 2133114 - DNA, 15 bp, Homo sapiens
acaaactttatctta

SEQ ID NO: 2133115 - DNA, 15 bp, Homo sapiens
caaactttatcttaa

SEQ ID NO: 2133116 - DNA, 15 bp, Homo sapiens
aaactttatcttaag

SEQ ID NO: 2133117 - DNA, 15 bp, Homo sapiens
aactttatcttaaga

SEQ ID NO: 2133118 - DNA, 15 bp, Homo sapiens
actttatcttaagaa

SEQ ID NO: 2133119 - DNA, 15 bp, Homo sapiens
ctttatcttaagaac

SEQ ID NO: 2133120 - DNA, 15 bp, Homo sapiens
tttatcttaagaacc

SEQ ID NO: 2133121 - DNA, 15 bp, Homo sapiens
ttatcttaagaacca

SEQ ID NO: 2133122 - DNA, 15 bp, Homo sapiens
tatcttaagaaccag

SEQ ID NO: 2133123 - DNA, 15 bp, Homo sapiens
atcttaagaaccaga

SEQ ID NO: 2133124 - DNA, 15 bp, Homo sapiens
tcttaagaaccagaa

SEQ ID NO: 2133125 - DNA, 15 bp, Homo sapiens
cttaagaaccagaat

SEQ ID NO: 2133126 - DNA, 15 bp, Homo sapiens
ttaagaaccagaatt

SEQ ID NO: 2133127 - DNA, 15 bp, Homo sapiens
taagaaccagaattt

SEQ ID NO: 2133128 - DNA, 15 bp, Homo sapiens
aagaaccagaattta

SEQ ID NO: 2133129 - DNA, 15 bp, Homo sapiens
agaaccagaatttac

SEQ ID NO: 2133130 - DNA, 15 bp, Homo sapiens
gaaccagaatttact

SEQ ID NO: 2133131 - DNA, 15 bp, Homo sapiens
aaccagaatttactt

SEQ ID NO: 2133132 - DNA, 15 bp, Homo sapiens
accagaatttacttc

SEQ ID NO: 2133133 - DNA, 15 bp, Homo sapiens
ccagaatttacttca

SEQ ID NO: 2133134 - DNA, 15 bp, Homo sapiens
cagaatttacttcaa

SEQ ID NO: 2133135 - DNA, 15 bp, Homo sapiens
agaatttacttcaat

SEQ ID NO: 2133136 - DNA, 15 bp, Homo sapiens
gaatttacttcaatc

SEQ ID NO: 2133137 - DNA, 15 bp, Homo sapiens
aatttacttcaatcc

SEQ ID NO: 2133138 - DNA, 15 bp, Homo sapiens
atttacttcaatcca

SEQ ID NO: 2133139 - DNA, 15 bp, Homo sapiens
tttacttcaatccac

SEQ ID NO: 2133140 - DNA, 15 bp, Homo sapiens
ttacttcaatccaca

SEQ ID NO: 2133141 - DNA, 15 bp, Homo sapiens
tacttcaatccacat

SEQ ID NO: 2133142 - DNA, 15 bp, Homo sapiens
acttcaatccacatt

SEQ ID NO: 2133143 - DNA, 15 bp, Homo sapiens
cttcaatccacattt

SEQ ID NO: 2133144 - DNA, 15 bp, Homo sapiens
ttcaatccacatttt

SEQ ID NO: 2133145 - DNA, 15 bp, Homo sapiens
tcaatccacattttg

SEQ ID NO: 2133146 - DNA, 15 bp, Homo sapiens
caatccacattttga

SEQ ID NO: 2133147 - DNA, 15 bp, Homo sapiens
aatccacattttgac

SEQ ID NO: 2133148 - DNA, 15 bp, Homo sapiens
atccacattttgaca

SEQ ID NO: 2133149 - DNA, 15 bp, Homo sapiens
tccacattttgacat

SEQ ID NO: 2133150 - DNA, 15 bp, Homo sapiens
ccacattttgacatt

SEQ ID NO: 2133151 - DNA, 15 bp, Homo sapiens
cacattttgacattg

SEQ ID NO: 2133152 - DNA, 15 bp, Homo sapiens
acattttgacattga

SEQ ID NO: 2133153 - DNA, 15 bp, Homo sapiens
cattttgacattgat

SEQ ID NO: 2133154 - DNA, 15 bp, Homo sapiens
attttgacattgatt

SEQ ID NO: 2133155 - DNA, 15 bp, Homo sapiens
ttttgacattgattt

SEQ ID NO: 2133156 - DNA, 15 bp, Homo sapiens
tttgacattgatttt

SEQ ID NO: 2133157 - DNA, 15 bp, Homo sapiens
ttgacattgattttc

SEQ ID NO: 2133158 - DNA, 15 bp, Homo sapiens
tgacattgattttca

SEQ ID NO: 2133159 - DNA, 15 bp, Homo sapiens
gacattgattttcag

SEQ ID NO: 2133160 - DNA, 15 bp, Homo sapiens
acattgattttcaga

SEQ ID NO: 2133161 - DNA, 15 bp, Homo sapiens
cattgattttcagat

SEQ ID NO: 2133162 - DNA, 15 bp, Homo sapiens
attgattttcagatt

SEQ ID NO: 2133163 - DNA, 15 bp, Homo sapiens
ttgattttcagatta

SEQ ID NO: 2133164 - DNA, 15 bp, Homo sapiens
tgattttcagattaa

SEQ ID NO: 2133165 - DNA, 15 bp, Homo sapiens
gattttcagattaaa

SEQ ID NO: 2133166 - DNA, 15 bp, Homo sapiens
attttcagattaaat

SEQ ID NO: 2133167 - DNA, 15 bp, Homo sapiens
ttttcagattaaatt

SEQ ID NO: 2133168 - DNA, 15 bp, Homo sapiens
tttcagattaaatta

SEQ ID NO: 2133169 - DNA, 15 bp, Homo sapiens
ttcagattaaattat

SEQ ID NO: 2133170 - DNA, 15 bp, Homo sapiens
tcagattaaattatt

SEQ ID NO: 2133171 - DNA, 15 bp, Homo sapiens
cagattaaattattc

SEQ ID NO: 2133172 - DNA, 15 bp, Homo sapiens
agattaaattattct

SEQ ID NO: 2133173 - DNA, 15 bp, Homo sapiens
gattaaattattctg

SEQ ID NO: 2133174 - DNA, 15 bp, Homo sapiens
attaaattattctga

SEQ ID NO: 2133175 - DNA, 15 bp, Homo sapiens
ttaaattattctgat

SEQ ID NO: 2133176 - DNA, 15 bp, Homo sapiens
taaattattctgata

SEQ ID NO: 2133177 - DNA, 15 bp, Homo sapiens
aaattattctgatat

SEQ ID NO: 2133178 - DNA, 15 bp, Homo sapiens
aattattctgatatc

SEQ ID NO: 2133179 - DNA, 15 bp, Homo sapiens
attattctgatatcg

SEQ ID NO: 2133180 - DNA, 15 bp, Homo sapiens
ttattctgatatcgc

SEQ ID NO: 2133181 - DNA, 15 bp, Homo sapiens
tattctgatatcgcc

SEQ ID NO: 2133182 - DNA, 15 bp, Homo sapiens
attctgatatcgcca

SEQ ID NO: 2133183 - DNA, 15 bp, Homo sapiens
ttctgatatcgccag

SEQ ID NO: 2133184 - DNA, 15 bp, Homo sapiens
tctgatatcgccagg

SEQ ID NO: 2133185 - DNA, 15 bp, Homo sapiens
ctgatatcgccaggt

SEQ ID NO: 2133186 - DNA, 15 bp, Homo sapiens
tgatatcgccaggta

SEQ ID NO: 2133187 - DNA, 15 bp, Homo sapiens
gatatcgccaggtaa

SEQ ID NO: 2133188 - DNA, 15 bp, Homo sapiens
atatcgccaggtaag

SEQ ID NO: 2133189 - DNA, 15 bp, Homo sapiens
tatcgccaggtaagc

SEQ ID NO: 2133190 - DNA, 15 bp, Homo sapiens
atcgccaggtaagct

SEQ ID NO: 2133191 - DNA, 15 bp, Homo sapiens
tcgccaggtaagctg

SEQ ID NO: 2133192 - DNA, 15 bp, Homo sapiens
cgccaggtaagctgt

SEQ ID NO: 2133193 - DNA, 15 bp, Homo sapiens
gccaggtaagctgtt

SEQ ID NO: 2133194 - DNA, 15 bp, Homo sapiens
ccaggtaagctgttc

SEQ ID NO: 2133195 - DNA, 15 bp, Homo sapiens
caggtaagctgttcc

SEQ ID NO: 2133196 - DNA, 15 bp, Homo sapiens
aggtaagctgttcct

SEQ ID NO: 2133197 - DNA, 15 bp, Homo sapiens
ggtaagctgttcctt

SEQ ID NO: 2133198 - DNA, 15 bp, Homo sapiens
gtaagctgttccttg

SEQ ID NO: 2133199 - DNA, 15 bp, Homo sapiens
taagctgttccttgg

SEQ ID NO: 2133200 - DNA, 15 bp, Homo sapiens
aagctgttccttggg

SEQ ID NO: 2133201 - DNA, 15 bp, Homo sapiens
agctgttccttgggt

SEQ ID NO: 2133202 - DNA, 15 bp, Homo sapiens
gctgttccttgggta

SEQ ID NO: 2133203 - DNA, 15 bp, Homo sapiens
ctgttccttgggtat

SEQ ID NO: 2133204 - DNA, 15 bp, Homo sapiens
tgttccttgggtatg

SEQ ID NO: 2133205 - DNA, 15 bp, Homo sapiens
gttccttgggtatgc

SEQ ID NO: 2133206 - DNA, 15 bp, Homo sapiens
ttccttgggtatgca

SEQ ID NO: 2133207 - DNA, 15 bp, Homo sapiens
tccttgggtatgcat

SEQ ID NO: 2133208 - DNA, 15 bp, Homo sapiens
ccttgggtatgcatt

SEQ ID NO: 2133209 - DNA, 15 bp, Homo sapiens
cttgggtatgcattt

SEQ ID NO: 2133210 - DNA, 15 bp, Homo sapiens
ttgggtatgcatttc

SEQ ID NO: 2133211 - DNA, 15 bp, Homo sapiens
tgggtatgcatttct

SEQ ID NO: 2133212 - DNA, 15 bp, Homo sapiens
gggtatgcatttctt

SEQ ID NO: 2133213 - DNA, 15 bp, Homo sapiens
ggtatgcatttcttc

SEQ ID NO: 2133214 - DNA, 15 bp, Homo sapiens
gtatgcatttcttct

SEQ ID NO: 2133215 - DNA, 15 bp, Homo sapiens
tatgcatttcttctt

SEQ ID NO: 2133216 - DNA, 15 bp, Homo sapiens
atgcatttcttcttt

SEQ ID NO: 2133217 - DNA, 15 bp, Homo sapiens
tgcatttcttctttc

SEQ ID NO: 2133218 - DNA, 15 bp, Homo sapiens
gcatttcttctttcc

SEQ ID NO: 2133219 - DNA, 15 bp, Homo sapiens
catttcttctttccg

SEQ ID NO: 2133220 - DNA, 15 bp, Homo sapiens
atttcttctttccgt

SEQ ID NO: 2133221 - DNA, 15 bp, Homo sapiens
tttcttctttccgtt

SEQ ID NO: 2133222 - DNA, 15 bp, Homo sapiens
ttcttctttccgttt

SEQ ID NO: 2133223 - DNA, 15 bp, Homo sapiens
tcttctttccgtttt

SEQ ID NO: 2133224 - DNA, 15 bp, Homo sapiens
cttctttccgttttt

SEQ ID NO: 2133225 - DNA, 15 bp, Homo sapiens
ttctttccgtttttt

SEQ ID NO: 2133226 - DNA, 15 bp, Homo sapiens
tctttccgttttttt

SEQ ID NO: 2133227 - DNA, 15 bp, Homo sapiens
ctttccgtttttttc

SEQ ID NO: 2133228 - DNA, 15 bp, Homo sapiens
tttccgtttttttct

SEQ ID NO: 2133229 - DNA, 15 bp, Homo sapiens
ttccgtttttttcta

SEQ ID NO: 2133230 - DNA, 15 bp, Homo sapiens
tccgtttttttctaa

SEQ ID NO: 2133231 - DNA, 15 bp, Homo sapiens
ccgtttttttctaag

SEQ ID NO: 2133232 - DNA, 15 bp, Homo sapiens
cgtttttttctaaga

SEQ ID NO: 2133233 - DNA, 15 bp, Homo sapiens
gtttttttctaagag

SEQ ID NO: 2133234 - DNA, 15 bp, Homo sapiens
tttttttctaagagc

SEQ ID NO: 2133235 - DNA, 15 bp, Homo sapiens
ttttttctaagagct

SEQ ID NO: 2133236 - DNA, 15 bp, Homo sapiens
tttttctaagagcta

SEQ ID NO: 2133237 - DNA, 15 bp, Homo sapiens
ttttctaagagctaa

SEQ ID NO: 2133238 - DNA, 15 bp, Homo sapiens
tttctaagagctaaa

SEQ ID NO: 2133239 - DNA, 15 bp, Homo sapiens
ttctaagagctaaag

SEQ ID NO: 2133240 - DNA, 15 bp, Homo sapiens
tctaagagctaaagg

SEQ ID NO: 2133241 - DNA, 15 bp, Homo sapiens
ctaagagctaaagga

SEQ ID NO: 2133242 - DNA, 15 bp, Homo sapiens
taagagctaaaggac

SEQ ID NO: 2133243 - DNA, 15 bp, Homo sapiens
aagagctaaaggacc

SEQ ID NO: 2133244 - DNA, 15 bp, Homo sapiens
agagctaaaggaccc

SEQ ID NO: 2133245 - DNA, 15 bp, Homo sapiens
gagctaaaggaccct

SEQ ID NO: 2133246 - DNA, 15 bp, Homo sapiens
agctaaaggaccctg

SEQ ID NO: 2133247 - DNA, 15 bp, Homo sapiens
gctaaaggaccctga

SEQ ID NO: 2133248 - DNA, 15 bp, Homo sapiens
ctaaaggaccctgag

SEQ ID NO: 2133249 - DNA, 15 bp, Homo sapiens
taaaggaccctgaga

SEQ ID NO: 2133250 - DNA, 15 bp, Homo sapiens
aaaggaccctgagaa

SEQ ID NO: 2133251 - DNA, 15 bp, Homo sapiens
aaggaccctgagaac

SEQ ID NO: 2133252 - DNA, 15 bp, Homo sapiens
aggaccctgagaaca

SEQ ID NO: 2133253 - DNA, 15 bp, Homo sapiens
ggaccctgagaacac

SEQ ID NO: 2133254 - DNA, 15 bp, Homo sapiens
gaccctgagaacact

SEQ ID NO: 2133255 - DNA, 15 bp, Homo sapiens
accctgagaacactg

SEQ ID NO: 2133256 - DNA, 15 bp, Homo sapiens
ccctgagaacactgg

SEQ ID NO: 2133257 - DNA, 15 bp, Homo sapiens
cctgagaacactgga

SEQ ID NO: 2133258 - DNA, 15 bp, Homo sapiens
ctgagaacactggag

SEQ ID NO: 2133259 - DNA, 15 bp, Homo sapiens
tgagaacactggagg

SEQ ID NO: 2133260 - DNA, 15 bp, Homo sapiens
gagaacactggaggt

SEQ ID NO: 2133261 - DNA, 15 bp, Homo sapiens
agaacactggaggtg

SEQ ID NO: 2133262 - DNA, 15 bp, Homo sapiens
gaacactggaggtgg

SEQ ID NO: 2133263 - DNA, 15 bp, Homo sapiens
aacactggaggtggg

SEQ ID NO: 2133264 - DNA, 15 bp, Homo sapiens
actggaggtgggaaa

SEQ ID NO: 2133265 - DNA, 15 bp, Homo sapiens
ctggaggtgggaaag

SEQ ID NO: 2133266 - DNA, 15 bp, Homo sapiens
tggaggtgggaaagg

SEQ ID NO: 2133267 - DNA, 15 bp, Homo sapiens
ggaggtgggaaagga

SEQ ID NO: 2133268 - DNA, 15 bp, Homo sapiens
gaggtgggaaaggaa

SEQ ID NO: 2133269 - DNA, 15 bp, Homo sapiens
aggtgggaaaggaag

SEQ ID NO: 2133270 - DNA, 15 bp, Homo sapiens
ggtgggaaaggaagg

SEQ ID NO: 2133271 - DNA, 15 bp, Homo sapiens
gtgggaaaggaaggg

SEQ ID NO: 2133272 - DNA, 15 bp, Homo sapiens
tgggaaaggaaggga

SEQ ID NO: 2133273 - DNA, 15 bp, Homo sapiens
gggaaaggaagggaa

SEQ ID NO: 2133274 - DNA, 15 bp, Homo sapiens
ggaaaggaagggaaa

SEQ ID NO: 2133275 - DNA, 15 bp, Homo sapiens
gaaaggaagggaaag

SEQ ID NO: 2133276 - DNA, 15 bp, Homo sapiens
aaaggaagggaaagg

SEQ ID NO: 2133277 - DNA, 15 bp, Homo sapiens
aaggaagggaaaggc

SEQ ID NO: 2133278 - DNA, 15 bp, Homo sapiens
aggaagggaaaggca

SEQ ID NO: 2133279 - DNA, 15 bp, Homo sapiens
ggaagggaaaggcat

SEQ ID NO: 2133280 - DNA, 15 bp, Homo sapiens
gaagggaaaggcatg

SEQ ID NO: 2133281 - DNA, 15 bp, Homo sapiens
aagggaaaggcatgt

SEQ ID NO: 2133282 - DNA, 15 bp, Homo sapiens
agggaaaggcatgtt

SEQ ID NO: 2133283 - DNA, 15 bp, Homo sapiens
gggaaaggcatgttc

SEQ ID NO: 2133284 - DNA, 15 bp, Homo sapiens
ggaaaggcatgttca

SEQ ID NO: 2133285 - DNA, 15 bp, Homo sapiens
gaaaggcatgttcac

SEQ ID NO: 2133286 - DNA, 15 bp, Homo sapiens
aaaggcatgttcaca

SEQ ID NO: 2133287 - DNA, 15 bp, Homo sapiens
aaggcatgttcacac

SEQ ID NO: 2133288 - DNA, 15 bp, Homo sapiens
aggcatgttcacacg

SEQ ID NO: 2133289 - DNA, 15 bp, Homo sapiens
ggcatgttcacacgt

SEQ ID NO: 2133290 - DNA, 15 bp, Homo sapiens
gcatgttcacacgtg

SEQ ID NO: 2133291 - DNA, 15 bp, Homo sapiens
catgttcacacgtgg

SEQ ID NO: 2133292 - DNA, 15 bp, Homo sapiens
atgttcacacgtggg

SEQ ID NO: 2133293 - DNA, 15 bp, Homo sapiens
tgttcacacgtggga

SEQ ID NO: 2133294 - DNA, 15 bp, Homo sapiens
gttcacacgtgggat

SEQ ID NO: 2133295 - DNA, 15 bp, Homo sapiens
ttcacacgtgggata

SEQ ID NO: 2133296 - DNA, 15 bp, Homo sapiens
tcacacgtgggatag

SEQ ID NO: 2133297 - DNA, 15 bp, Homo sapiens
cacacgtgggatagg

SEQ ID NO: 2133298 - DNA, 15 bp, Homo sapiens
acacgtgggatagga

SEQ ID NO: 2133299 - DNA, 15 bp, Homo sapiens
cacgtgggataggaa

SEQ ID NO: 2133300 - DNA, 15 bp, Homo sapiens
acgtgggataggaaa

SEQ ID NO: 2133301 - DNA, 15 bp, Homo sapiens
cgtgggataggaaag

SEQ ID NO: 2133302 - DNA, 15 bp, Homo sapiens
gtgggataggaaagg

SEQ ID NO: 2133303 - DNA, 15 bp, Homo sapiens
tgggataggaaaggt

SEQ ID NO: 2133304 - DNA, 15 bp, Homo sapiens
gggataggaaaggtt

SEQ ID NO: 2133305 - DNA, 15 bp, Homo sapiens
ggataggaaaggttc

SEQ ID NO: 2133306 - DNA, 15 bp, Homo sapiens
gataggaaaggttca

SEQ ID NO: 2133307 - DNA, 15 bp, Homo sapiens
ataggaaaggttcat

SEQ ID NO: 2133308 - DNA, 15 bp, Homo sapiens
taggaaaggttcatt

SEQ ID NO: 2133309 - DNA, 15 bp, Homo sapiens
aggaaaggttcattt

SEQ ID NO: 2133310 - DNA, 15 bp, Homo sapiens
ggaaaggttcattta

SEQ ID NO: 2133311 - DNA, 15 bp, Homo sapiens
gaaaggttcatttac

SEQ ID NO: 2133312 - DNA, 15 bp, Homo sapiens
aaaggttcatttact

SEQ ID NO: 2133313 - DNA, 15 bp, Homo sapiens
aaggttcatttactg

SEQ ID NO: 2133314 - DNA, 15 bp, Homo sapiens
aggttcatttactga

SEQ ID NO: 2133315 - DNA, 15 bp, Homo sapiens
ggttcatttactgac

SEQ ID NO: 2133316 - DNA, 15 bp, Homo sapiens
gttcatttactgacc

SEQ ID NO: 2133317 - DNA, 15 bp, Homo sapiens
ttcatttactgacct

SEQ ID NO: 2133318 - DNA, 15 bp, Homo sapiens
tcatttactgacctc

SEQ ID NO: 2133319 - DNA, 15 bp, Homo sapiens
catttactgacctcc

SEQ ID NO: 2133320 - DNA, 15 bp, Homo sapiens
atttactgacctcca

SEQ ID NO: 2133321 - DNA, 15 bp, Homo sapiens
tttactgacctccag

SEQ ID NO: 2133322 - DNA, 15 bp, Homo sapiens
ttactgacctccagc

SEQ ID NO: 2133323 - DNA, 15 bp, Homo sapiens
tactgacctccagct

SEQ ID NO: 2133324 - DNA, 15 bp, Homo sapiens
actgacctccagcta

SEQ ID NO: 2133325 - DNA, 15 bp, Homo sapiens
ctgacctccagctag

SEQ ID NO: 2133326 - DNA, 15 bp, Homo sapiens
tgacctccagctagc

SEQ ID NO: 2133327 - DNA, 15 bp, Homo sapiens
gacctccagctagcc

SEQ ID NO: 2133328 - DNA, 15 bp, Homo sapiens
acctccagctagcct

SEQ ID NO: 2133329 - DNA, 15 bp, Homo sapiens
cctccagctagcctt

SEQ ID NO: 2133330 - DNA, 15 bp, Homo sapiens
ctccagctagccttc

SEQ ID NO: 2133331 - DNA, 15 bp, Homo sapiens
tccagctagccttcc

SEQ ID NO: 2133332 - DNA, 15 bp, Homo sapiens
ccagctagccttcca

SEQ ID NO: 2133333 - DNA, 15 bp, Homo sapiens
cagctagccttccaa

SEQ ID NO: 2133334 - DNA, 15 bp, Homo sapiens
agctagccttccaaa

SEQ ID NO: 2133335 - DNA, 15 bp, Homo sapiens
gctagccttccaaag

SEQ ID NO: 2133336 - DNA, 15 bp, Homo sapiens
ctagccttccaaagt

SEQ ID NO: 2133337 - DNA, 15 bp, Homo sapiens
tagccttccaaagtg

SEQ ID NO: 2133338 - DNA, 15 bp, Homo sapiens
agccttccaaagtgc

SEQ ID NO: 2133339 - DNA, 15 bp, Homo sapiens
gccttccaaagtgcc

SEQ ID NO: 2133340 - DNA, 15 bp, Homo sapiens
ccttccaaagtgcct

SEQ ID NO: 2133341 - DNA, 15 bp, Homo sapiens
cttccaaagtgccta

SEQ ID NO: 2133342 - DNA, 15 bp, Homo sapiens
ttccaaagtgcctat

SEQ ID NO: 2133343 - DNA, 15 bp, Homo sapiens
tccaaagtgcctatt

SEQ ID NO: 2133344 - DNA, 15 bp, Homo sapiens
ccaaagtgcctattt

SEQ ID NO: 2133345 - DNA, 15 bp, Homo sapiens
caaagtgcctattta

SEQ ID NO: 2133346 - DNA, 15 bp, Homo sapiens
aaagtgcctatttaa

SEQ ID NO: 2133347 - DNA, 15 bp, Homo sapiens
aagtgcctatttaag

SEQ ID NO: 2133348 - DNA, 15 bp, Homo sapiens
agtgcctatttaaga

SEQ ID NO: 2133349 - DNA, 15 bp, Homo sapiens
gtgcctatttaagac

SEQ ID NO: 2133350 - DNA, 15 bp, Homo sapiens
tgcctatttaagacc

SEQ ID NO: 2133351 - DNA, 15 bp, Homo sapiens
gcctatttaagaccc

SEQ ID NO: 2133352 - DNA, 15 bp, Homo sapiens
cctatttaagaccca

SEQ ID NO: 2133353 - DNA, 15 bp, Homo sapiens
ctatttaagacccaa

SEQ ID NO: 2133354 - DNA, 15 bp, Homo sapiens
tatttaagacccaag

SEQ ID NO: 2133355 - DNA, 15 bp, Homo sapiens
atttaagacccaagg

SEQ ID NO: 2133356 - DNA, 15 bp, Homo sapiens
tttaagacccaagga

SEQ ID NO: 2133357 - DNA, 15 bp, Homo sapiens
ttaagacccaaggag

SEQ ID NO: 2133358 - DNA, 15 bp, Homo sapiens
taagacccaaggagt

SEQ ID NO: 2133359 - DNA, 15 bp, Homo sapiens
aagacccaaggagta

SEQ ID NO: 2133360 - DNA, 15 bp, Homo sapiens
agacccaaggagtag

SEQ ID NO: 2133361 - DNA, 15 bp, Homo sapiens
gacccaaggagtaga

SEQ ID NO: 2133362 - DNA, 15 bp, Homo sapiens
acccaaggagtagat

SEQ ID NO: 2133363 - DNA, 15 bp, Homo sapiens
cccaaggagtagatg

SEQ ID NO: 2133364 - DNA, 15 bp, Homo sapiens
ccaaggagtagatgt

SEQ ID NO: 2133365 - DNA, 15 bp, Homo sapiens
caaggagtagatgtc

SEQ ID NO: 2133366 - DNA, 15 bp, Homo sapiens
aaggagtagatgtct

SEQ ID NO: 2133367 - DNA, 15 bp, Homo sapiens
aggagtagatgtctt

SEQ ID NO: 2133368 - DNA, 15 bp, Homo sapiens
ggagtagatgtcttc

SEQ ID NO: 2133369 - DNA, 15 bp, Homo sapiens
gagtagatgtcttcc

SEQ ID NO: 2133370 - DNA, 15 bp, Homo sapiens
agtagatgtcttcct

SEQ ID NO: 2133371 - DNA, 15 bp, Homo sapiens
gtagatgtcttcctt

SEQ ID NO: 2133372 - DNA, 15 bp, Homo sapiens
tagatgtcttccttg

SEQ ID NO: 2133373 - DNA, 15 bp, Homo sapiens
agatgtcttccttgg

SEQ ID NO: 2133374 - DNA, 15 bp, Homo sapiens
gatgtcttccttggc

SEQ ID NO: 2133375 - DNA, 15 bp, Homo sapiens
atgtcttccttggca

SEQ ID NO: 2133376 - DNA, 15 bp, Homo sapiens
tgtcttccttggcaa

SEQ ID NO: 2133377 - DNA, 15 bp, Homo sapiens
gtcttccttggcaat

SEQ ID NO: 2133378 - DNA, 15 bp, Homo sapiens
tcttccttggcaatt

SEQ ID NO: 2133379 - DNA, 15 bp, Homo sapiens
cttccttggcaattg

SEQ ID NO: 2133380 - DNA, 15 bp, Homo sapiens
ttccttggcaattgt

SEQ ID NO: 2133381 - DNA, 15 bp, Homo sapiens
tccttggcaattgta

SEQ ID NO: 2133382 - DNA, 15 bp, Homo sapiens
ccttggcaattgtaa

SEQ ID NO: 2133383 - DNA, 15 bp, Homo sapiens
cttggcaattgtaac

SEQ ID NO: 2133384 - DNA, 15 bp, Homo sapiens
ttggcaattgtaacc

SEQ ID NO: 2133385 - DNA, 15 bp, Homo sapiens
tggcaattgtaaccc

SEQ ID NO: 2133386 - DNA, 15 bp, Homo sapiens
ggcaattgtaaccca

SEQ ID NO: 2133387 - DNA, 15 bp, Homo sapiens
gcaattgtaacccaa

SEQ ID NO: 2133388 - DNA, 15 bp, Homo sapiens
caattgtaacccaaa

SEQ ID NO: 2133389 - DNA, 15 bp, Homo sapiens
aattgtaacccaaat

SEQ ID NO: 2133390 - DNA, 15 bp, Homo sapiens
attgtaacccaaata

SEQ ID NO: 2133391 - DNA, 15 bp, Homo sapiens
ttgtaacccaaatat

SEQ ID NO: 2133392 - DNA, 15 bp, Homo sapiens
tgtaacccaaatata

SEQ ID NO: 2133393 - DNA, 15 bp, Homo sapiens
gtaacccaaatataa

SEQ ID NO: 2133394 - DNA, 15 bp, Homo sapiens
taacccaaatataat

SEQ ID NO: 2133395 - DNA, 15 bp, Homo sapiens
aacccaaatataatt

SEQ ID NO: 2133396 - DNA, 15 bp, Homo sapiens
acccaaatataattt

SEQ ID NO: 2133397 - DNA, 15 bp, Homo sapiens
cccaaatataatttt

SEQ ID NO: 2133398 - DNA, 15 bp, Homo sapiens
ccaaatataattttt

SEQ ID NO: 2133399 - DNA, 15 bp, Homo sapiens
caaatataattttta

SEQ ID NO: 2133400 - DNA, 15 bp, Homo sapiens
aaatataatttttaa

SEQ ID NO: 2133401 - DNA, 15 bp, Homo sapiens
aatataatttttaac

SEQ ID NO: 2133402 - DNA, 15 bp, Homo sapiens
atataatttttaacc

SEQ ID NO: 2133403 - DNA, 15 bp, Homo sapiens
tataatttttaacct

SEQ ID NO: 2133404 - DNA, 15 bp, Homo sapiens
ataatttttaacctt

SEQ ID NO: 2133405 - DNA, 15 bp, Homo sapiens
taatttttaaccttt

SEQ ID NO: 2133406 - DNA, 15 bp, Homo sapiens
aatttttaacctttc

SEQ ID NO: 2133407 - DNA, 15 bp, Homo sapiens
atttttaacctttca

SEQ ID NO: 2133408 - DNA, 15 bp, Homo sapiens
tttttaacctttcaa

SEQ ID NO: 2133409 - DNA, 15 bp, Homo sapiens
ttttaacctttcaat

SEQ ID NO: 2133410 - DNA, 15 bp, Homo sapiens
tttaacctttcaatt

SEQ ID NO: 2133411 - DNA, 15 bp, Homo sapiens
ttaacctttcaattt

SEQ ID NO: 2133412 - DNA, 15 bp, Homo sapiens
taacctttcaatttt

SEQ ID NO: 2133413 - DNA, 15 bp, Homo sapiens
aacctttcaatttta

SEQ ID NO: 2133414 - DNA, 15 bp, Homo sapiens
acctttcaattttag

SEQ ID NO: 2133415 - DNA, 15 bp, Homo sapiens
cctttcaattttagt

SEQ ID NO: 2133416 - DNA, 15 bp, Homo sapiens
ctttcaattttagtc

SEQ ID NO: 2133417 - DNA, 15 bp, Homo sapiens
tttcaattttagtca

SEQ ID NO: 2133418 - DNA, 15 bp, Homo sapiens
ttcaattttagtcaa

SEQ ID NO: 2133419 - DNA, 15 bp, Homo sapiens
tcaattttagtcaag

SEQ ID NO: 2133420 - DNA, 15 bp, Homo sapiens
caattttagtcaaga

SEQ ID NO: 2133421 - DNA, 15 bp, Homo sapiens
aattttagtcaagaa

SEQ ID NO: 2133422 - DNA, 15 bp, Homo sapiens
attttagtcaagaaa

SEQ ID NO: 2133423 - DNA, 15 bp, Homo sapiens
ttttagtcaagaaag

SEQ ID NO: 2133424 - DNA, 15 bp, Homo sapiens
tttagtcaagaaagt

SEQ ID NO: 2133425 - DNA, 15 bp, Homo sapiens
ttagtcaagaaagtt

SEQ ID NO: 2133426 - DNA, 15 bp, Homo sapiens
tagtcaagaaagttg

SEQ ID NO: 2133427 - DNA, 15 bp, Homo sapiens
agtcaagaaagttgg

SEQ ID NO: 2133428 - DNA, 15 bp, Homo sapiens
gtcaagaaagttggt

SEQ ID NO: 2133429 - DNA, 15 bp, Homo sapiens
tcaagaaagttggtg

SEQ ID NO: 2133430 - DNA, 15 bp, Homo sapiens
caagaaagttggtgt

SEQ ID NO: 2133431 - DNA, 15 bp, Homo sapiens
aagaaagttggtgtg

SEQ ID NO: 2133432 - DNA, 15 bp, Homo sapiens
agaaagttggtgtgc

SEQ ID NO: 2133433 - DNA, 15 bp, Homo sapiens
gaaagttggtgtgct

SEQ ID NO: 2133434 - DNA, 15 bp, Homo sapiens
aaagttggtgtgctg

SEQ ID NO: 2133435 - DNA, 15 bp, Homo sapiens
aagttggtgtgctgt

SEQ ID NO: 2133436 - DNA, 15 bp, Homo sapiens
agttggtgtgctgtt

SEQ ID NO: 2133437 - DNA, 15 bp, Homo sapiens
gttggtgtgctgtta

SEQ ID NO: 2133438 - DNA, 15 bp, Homo sapiens
ttggtgtgctgttac

SEQ ID NO: 2133439 - DNA, 15 bp, Homo sapiens
tggtgtgctgttaca

SEQ ID NO: 2133440 - DNA, 15 bp, Homo sapiens
ggtgtgctgttacaa

SEQ ID NO: 2133441 - DNA, 15 bp, Homo sapiens
gtgtgctgttacaaa

SEQ ID NO: 2133442 - DNA, 15 bp, Homo sapiens
tgtgctgttacaaaa

SEQ ID NO: 2133443 - DNA, 15 bp, Homo sapiens
gtgctgttacaaaaa

SEQ ID NO: 2133444 - DNA, 15 bp, Homo sapiens
tgctgttacaaaaag

SEQ ID NO: 2133445 - DNA, 15 bp, Homo sapiens
gctgttacaaaaagt

SEQ ID NO: 2133446 - DNA, 15 bp, Homo sapiens
ctgttacaaaaagtg

SEQ ID NO: 2133447 - DNA, 15 bp, Homo sapiens
tgttacaaaaagtgc

SEQ ID NO: 2133448 - DNA, 15 bp, Homo sapiens
gttacaaaaagtgcc

SEQ ID NO: 2133449 - DNA, 15 bp, Homo sapiens
ttacaaaaagtgccc

SEQ ID NO: 2133450 - DNA, 15 bp, Homo sapiens
tacaaaaagtgccct

SEQ ID NO: 2133451 - DNA, 15 bp, Homo sapiens
acaaaaagtgccctg

SEQ ID NO: 2133452 - DNA, 15 bp, Homo sapiens
caaaaagtgccctga

SEQ ID NO: 2133453 - DNA, 15 bp, Homo sapiens
aaaaagtgccctgat

SEQ ID NO: 2133454 - DNA, 15 bp, Homo sapiens
aaaagtgccctgatt

SEQ ID NO: 2133455 - DNA, 15 bp, Homo sapiens
aaagtgccctgatta

SEQ ID NO: 2133456 - DNA, 15 bp, Homo sapiens
aagtgccctgattaa

SEQ ID NO: 2133457 - DNA, 15 bp, Homo sapiens
agtgccctgattaac

SEQ ID NO: 2133458 - DNA, 15 bp, Homo sapiens
gtgccctgattaaca

SEQ ID NO: 2133459 - DNA, 15 bp, Homo sapiens
tgccctgattaacag

SEQ ID NO: 2133460 - DNA, 15 bp, Homo sapiens
gccctgattaacagc

SEQ ID NO: 2133461 - DNA, 15 bp, Homo sapiens
ccctgattaacagca

SEQ ID NO: 2133462 - DNA, 15 bp, Homo sapiens
cctgattaacagcat

SEQ ID NO: 2133463 - DNA, 15 bp, Homo sapiens
ctgattaacagcatt

SEQ ID NO: 2133464 - DNA, 15 bp, Homo sapiens
tgattaacagcattg

SEQ ID NO: 2133465 - DNA, 15 bp, Homo sapiens
gattaacagcattgt

SEQ ID NO: 2133466 - DNA, 15 bp, Homo sapiens
attaacagcattgtc

SEQ ID NO: 2133467 - DNA, 15 bp, Homo sapiens
ttaacagcattgtca

SEQ ID NO: 2133468 - DNA, 15 bp, Homo sapiens
taacagcattgtcat

SEQ ID NO: 2133469 - DNA, 15 bp, Homo sapiens
aacagcattgtcatg

SEQ ID NO: 2133470 - DNA, 15 bp, Homo sapiens
acagcattgtcatgt

SEQ ID NO: 2133471 - DNA, 15 bp, Homo sapiens
cagcattgtcatgtg

SEQ ID NO: 2133472 - DNA, 15 bp, Homo sapiens
agcattgtcatgtgc

SEQ ID NO: 2133473 - DNA, 15 bp, Homo sapiens
gcattgtcatgtgca

SEQ ID NO: 2133474 - DNA, 15 bp, Homo sapiens
cattgtcatgtgcat

SEQ ID NO: 2133475 - DNA, 15 bp, Homo sapiens
attgtcatgtgcatt

SEQ ID NO: 2133476 - DNA, 15 bp, Homo sapiens
ttgtcatgtgcattg

SEQ ID NO: 2133477 - DNA, 15 bp, Homo sapiens
tgtcatgtgcattgc

SEQ ID NO: 2133478 - DNA, 15 bp, Homo sapiens
catgtgcattgcata

SEQ ID NO: 2133479 - DNA, 15 bp, Homo sapiens
atgtgcattgcatat

SEQ ID NO: 2133480 - DNA, 15 bp, Homo sapiens
tgtgcattgcatatt

SEQ ID NO: 2133481 - DNA, 15 bp, Homo sapiens
gtgcattgcatatta

SEQ ID NO: 2133482 - DNA, 15 bp, Homo sapiens
tgcattgcatattaa

SEQ ID NO: 2133483 - DNA, 15 bp, Homo sapiens
gcattgcatattaat

SEQ ID NO: 2133484 - DNA, 15 bp, Homo sapiens
cattgcatattaatc

SEQ ID NO: 2133485 - DNA, 15 bp, Homo sapiens
attgcatattaatca

SEQ ID NO: 2133486 - DNA, 15 bp, Homo sapiens
ttgcatattaatcag

SEQ ID NO: 2133487 - DNA, 15 bp, Homo sapiens
tgcatattaatcagc

SEQ ID NO: 2133488 - DNA, 15 bp, Homo sapiens
gcatattaatcagca

SEQ ID NO: 2133489 - DNA, 15 bp, Homo sapiens
catattaatcagcaa

SEQ ID NO: 2133490 - DNA, 15 bp, Homo sapiens
atattaatcagcaat

SEQ ID NO: 2133491 - DNA, 15 bp, Homo sapiens
tattaatcagcaatt

SEQ ID NO: 2133492 - DNA, 15 bp, Homo sapiens
attaatcagcaattt

SEQ ID NO: 2133493 - DNA, 15 bp, Homo sapiens
ttaatcagcaattta

SEQ ID NO: 2133494 - DNA, 15 bp, Homo sapiens
taatcagcaatttaa

SEQ ID NO: 2133495 - DNA, 15 bp, Homo sapiens
aatcagcaatttaaa

SEQ ID NO: 2133496 - DNA, 15 bp, Homo sapiens
atcagcaatttaaaa

SEQ ID NO: 2133497 - DNA, 15 bp, Homo sapiens
tcagcaatttaaaat

SEQ ID NO: 2133498 - DNA, 15 bp, Homo sapiens
cagcaatttaaaata

SEQ ID NO: 2133499 - DNA, 15 bp, Homo sapiens
agcaatttaaaataa

SEQ ID NO: 2133500 - DNA, 15 bp, Homo sapiens
gcaatttaaaataac

SEQ ID NO: 2133501 - DNA, 15 bp, Homo sapiens
caatttaaaataaca

SEQ ID NO: 2133502 - DNA, 15 bp, Homo sapiens
aatttaaaataacat

SEQ ID NO: 2133503 - DNA, 15 bp, Homo sapiens
atttaaaataacatg

SEQ ID NO: 2133504 - DNA, 15 bp, Homo sapiens
tttaaaataacatga

SEQ ID NO: 2133505 - DNA, 15 bp, Homo sapiens
ttaaaataacatgaa

SEQ ID NO: 2133506 - DNA, 15 bp, Homo sapiens
taaaataacatgaaa

SEQ ID NO: 2133507 - DNA, 15 bp, Homo sapiens
aaaataacatgaaat

SEQ ID NO: 2133508 - DNA, 15 bp, Homo sapiens
aaataacatgaaatt

SEQ ID NO: 2133509 - DNA, 15 bp, Homo sapiens
aataacatgaaatta

SEQ ID NO: 2133510 - DNA, 15 bp, Homo sapiens
ataacatgaaattat

SEQ ID NO: 2133511 - DNA, 15 bp, Homo sapiens
taacatgaaattatg

SEQ ID NO: 2133512 - DNA, 15 bp, Homo sapiens
aacatgaaattatgt

SEQ ID NO: 2133513 - DNA, 15 bp, Homo sapiens
acatgaaattatgtt

SEQ ID NO: 2133514 - DNA, 15 bp, Homo sapiens
catgaaattatgttg

SEQ ID NO: 2133515 - DNA, 15 bp, Homo sapiens
atgaaattatgttga

SEQ ID NO: 2133516 - DNA, 15 bp, Homo sapiens
tgaaattatgttgag

SEQ ID NO: 2133517 - DNA, 15 bp, Homo sapiens
gaaattatgttgagt

SEQ ID NO: 2133518 - DNA, 15 bp, Homo sapiens
aaattatgttgagta

SEQ ID NO: 2133519 - DNA, 15 bp, Homo sapiens
aattatgttgagtat

SEQ ID NO: 2133520 - DNA, 15 bp, Homo sapiens
attatgttgagtata

SEQ ID NO: 2133521 - DNA, 15 bp, Homo sapiens
ttatgttgagtataa

SEQ ID NO: 2133522 - DNA, 15 bp, Homo sapiens
tatgttgagtataat

SEQ ID NO: 2133523 - DNA, 15 bp, Homo sapiens
atgttgagtataatt

SEQ ID NO: 2133524 - DNA, 15 bp, Homo sapiens
tgttgagtataattt

SEQ ID NO: 2133525 - DNA, 15 bp, Homo sapiens
gttgagtataatttt

SEQ ID NO: 2133526 - DNA, 15 bp, Homo sapiens
ttgagtataatttta

SEQ ID NO: 2133527 - DNA, 15 bp, Homo sapiens
tgagtataattttaa

SEQ ID NO: 2133528 - DNA, 15 bp, Homo sapiens
gagtataattttaat

SEQ ID NO: 2133529 - DNA, 15 bp, Homo sapiens
agtataattttaata

SEQ ID NO: 2133530 - DNA, 15 bp, Homo sapiens
gtataattttaatat

SEQ ID NO: 2133531 - DNA, 15 bp, Homo sapiens
tataattttaatatt

SEQ ID NO: 2133532 - DNA, 15 bp, Homo sapiens
ataattttaatattt

SEQ ID NO: 2133533 - DNA, 15 bp, Homo sapiens
taattttaatatttt

SEQ ID NO: 2133534 - DNA, 15 bp, Homo sapiens
aattttaatatttta

SEQ ID NO: 2133535 - DNA, 15 bp, Homo sapiens
attttaatattttat

SEQ ID NO: 2133536 - DNA, 15 bp, Homo sapiens
ttttaatattttata

SEQ ID NO: 2133537 - DNA, 15 bp, Homo sapiens
tttaatattttatat

SEQ ID NO: 2133538 - DNA, 15 bp, Homo sapiens
ttaatattttatatt

SEQ ID NO: 2133539 - DNA, 15 bp, Homo sapiens
taatattttatatta

SEQ ID NO: 2133540 - DNA, 15 bp, Homo sapiens
aatattttatattag

SEQ ID NO: 2133541 - DNA, 15 bp, Homo sapiens
atattttatattaga

SEQ ID NO: 2133542 - DNA, 15 bp, Homo sapiens
tattttatattagat

SEQ ID NO: 2133543 - DNA, 15 bp, Homo sapiens
attttatattagata

SEQ ID NO: 2133544 - DNA, 15 bp, Homo sapiens
ttttatattagatat

SEQ ID NO: 2133545 - DNA, 15 bp, Homo sapiens
tttatattagatatt

SEQ ID NO: 2133546 - DNA, 15 bp, Homo sapiens
ttatattagatatta

SEQ ID NO: 2133547 - DNA, 15 bp, Homo sapiens
tatattagatattag

SEQ ID NO: 2133548 - DNA, 15 bp, Homo sapiens
atattagatattagt

SEQ ID NO: 2133549 - DNA, 15 bp, Homo sapiens
tattagatattagtt

SEQ ID NO: 2133550 - DNA, 15 bp, Homo sapiens
attagatattagttt

SEQ ID NO: 2133551 - DNA, 15 bp, Homo sapiens
ttagatattagtttg

SEQ ID NO: 2133552 - DNA, 15 bp, Homo sapiens
tagatattagtttga

SEQ ID NO: 2133553 - DNA, 15 bp, Homo sapiens
agatattagtttgag

SEQ ID NO: 2133554 - DNA, 15 bp, Homo sapiens
gatattagtttgaga

SEQ ID NO: 2133555 - DNA, 15 bp, Homo sapiens
atattagtttgagac

SEQ ID NO: 2133556 - DNA, 15 bp, Homo sapiens
tattagtttgagaca

SEQ ID NO: 2133557 - DNA, 15 bp, Homo sapiens
attagtttgagacag

SEQ ID NO: 2133558 - DNA, 15 bp, Homo sapiens
ttagtttgagacagt

SEQ ID NO: 2133559 - DNA, 15 bp, Homo sapiens
tagtttgagacagtg

SEQ ID NO: 2133560 - DNA, 15 bp, Homo sapiens
agtttgagacagtgt

SEQ ID NO: 2133561 - DNA, 15 bp, Homo sapiens
gtttgagacagtgtt

SEQ ID NO: 2133562 - DNA, 15 bp, Homo sapiens
tttgagacagtgttt

SEQ ID NO: 2133563 - DNA, 15 bp, Homo sapiens
ttgagacagtgtttc

SEQ ID NO: 2133564 - DNA, 15 bp, Homo sapiens
tgagacagtgtttct

SEQ ID NO: 2133565 - DNA, 15 bp, Homo sapiens
gagacagtgtttctc

SEQ ID NO: 2133566 - DNA, 15 bp, Homo sapiens
agacagtgtttctca

SEQ ID NO: 2133567 - DNA, 15 bp, Homo sapiens
gacagtgtttctcaa

SEQ ID NO: 2133568 - DNA, 15 bp, Homo sapiens
acagtgtttctcaag

SEQ ID NO: 2133569 - DNA, 15 bp, Homo sapiens
cagtgtttctcaagt

SEQ ID NO: 2133570 - DNA, 15 bp, Homo sapiens
agtgtttctcaagtc

SEQ ID NO: 2133571 - DNA, 15 bp, Homo sapiens
gtgtttctcaagtct

SEQ ID NO: 2133572 - DNA, 15 bp, Homo sapiens
tgtttctcaagtctg

SEQ ID NO: 2133573 - DNA, 15 bp, Homo sapiens
gtttctcaagtctgt

SEQ ID NO: 2133574 - DNA, 15 bp, Homo sapiens
tttctcaagtctgta

SEQ ID NO: 2133575 - DNA, 15 bp, Homo sapiens
ttctcaagtctgtat

SEQ ID NO: 2133576 - DNA, 15 bp, Homo sapiens
tctcaagtctgtata

SEQ ID NO: 2133577 - DNA, 15 bp, Homo sapiens
ctcaagtctgtataa

SEQ ID NO: 2133578 - DNA, 15 bp, Homo sapiens
tcaagtctgtataat

SEQ ID NO: 2133579 - DNA, 15 bp, Homo sapiens
caagtctgtataata

SEQ ID NO: 2133580 - DNA, 15 bp, Homo sapiens
aagtctgtataataa

SEQ ID NO: 2133581 - DNA, 15 bp, Homo sapiens
agtctgtataataag

SEQ ID NO: 2133582 - DNA, 15 bp, Homo sapiens
gtctgtataataagt

SEQ ID NO: 2133583 - DNA, 15 bp, Homo sapiens
tctgtataataagtt

SEQ ID NO: 2133584 - DNA, 15 bp, Homo sapiens
ctgtataataagttt

SEQ ID NO: 2133585 - DNA, 15 bp, Homo sapiens
tgtataataagtttg

SEQ ID NO: 2133586 - DNA, 15 bp, Homo sapiens
gtataataagtttga

SEQ ID NO: 2133587 - DNA, 15 bp, Homo sapiens
tataataagtttgat

SEQ ID NO: 2133588 - DNA, 15 bp, Homo sapiens
ataataagtttgata

SEQ ID NO: 2133589 - DNA, 15 bp, Homo sapiens
taataagtttgatag

SEQ ID NO: 2133590 - DNA, 15 bp, Homo sapiens
aataagtttgatagt

SEQ ID NO: 2133591 - DNA, 15 bp, Homo sapiens
ataagtttgatagta

SEQ ID NO: 2133592 - DNA, 15 bp, Homo sapiens
taagtttgatagtag

SEQ ID NO: 2133593 - DNA, 15 bp, Homo sapiens
aagtttgatagtagg

SEQ ID NO: 2133594 - DNA, 15 bp, Homo sapiens
agtttgatagtaggg

SEQ ID NO: 2133595 - DNA, 15 bp, Homo sapiens
gtttgatagtaggga

SEQ ID NO: 2133596 - DNA, 15 bp, Homo sapiens
tttgatagtagggag

SEQ ID NO: 2133597 - DNA, 15 bp, Homo sapiens
ttgatagtagggagg

SEQ ID NO: 2133598 - DNA, 15 bp, Homo sapiens
tgatagtagggaggt

SEQ ID NO: 2133599 - DNA, 15 bp, Homo sapiens
gatagtagggaggtt

SEQ ID NO: 2133600 - DNA, 15 bp, Homo sapiens
atagtagggaggttt

SEQ ID NO: 2133601 - DNA, 15 bp, Homo sapiens
tagtagggaggtttt

SEQ ID NO: 2133602 - DNA, 15 bp, Homo sapiens
agtagggaggttttc

SEQ ID NO: 2133603 - DNA, 15 bp, Homo sapiens
gtagggaggttttct

SEQ ID NO: 2133604 - DNA, 15 bp, Homo sapiens
tagggaggttttctc

SEQ ID NO: 2133605 - DNA, 15 bp, Homo sapiens
agggaggttttctct

SEQ ID NO: 2133606 - DNA, 15 bp, Homo sapiens
gggaggttttctctc

SEQ ID NO: 2133607 - DNA, 15 bp, Homo sapiens
ggaggttttctctca

SEQ ID NO: 2133608 - DNA, 15 bp, Homo sapiens
gaggttttctctcaa

SEQ ID NO: 2133609 - DNA, 15 bp, Homo sapiens
aggttttctctcaag

SEQ ID NO: 2133610 - DNA, 15 bp, Homo sapiens
ggttttctctcaaga

SEQ ID NO: 2133611 - DNA, 15 bp, Homo sapiens
gttttctctcaagaa

SEQ ID NO: 2133612 - DNA, 15 bp, Homo sapiens
ttttctctcaagaaa

SEQ ID NO: 2133613 - DNA, 15 bp, Homo sapiens
tttctctcaagaaaa

SEQ ID NO: 2133614 - DNA, 15 bp, Homo sapiens
ttctctcaagaaaag

SEQ ID NO: 2133615 - DNA, 15 bp, Homo sapiens
tctctcaagaaaaga

SEQ ID NO: 2133616 - DNA, 15 bp, Homo sapiens
ctctcaagaaaagaa

SEQ ID NO: 2133617 - DNA, 15 bp, Homo sapiens
tctcaagaaaagaat

SEQ ID NO: 2133618 - DNA, 15 bp, Homo sapiens
ctcaagaaaagaatt

SEQ ID NO: 2133619 - DNA, 15 bp, Homo sapiens
tcaagaaaagaatta

SEQ ID NO: 2133620 - DNA, 15 bp, Homo sapiens
caagaaaagaattat

SEQ ID NO: 2133621 - DNA, 15 bp, Homo sapiens
aagaaaagaattatt

SEQ ID NO: 2133622 - DNA, 15 bp, Homo sapiens
agaaaagaattattc

SEQ ID NO: 2133623 - DNA, 15 bp, Homo sapiens
gaaaagaattattca

SEQ ID NO: 2133624 - DNA, 15 bp, Homo sapiens
aaaagaattattcag

SEQ ID NO: 2133625 - DNA, 15 bp, Homo sapiens
aaagaattattcagt

SEQ ID NO: 2133626 - DNA, 15 bp, Homo sapiens
aagaattattcagtg

SEQ ID NO: 2133627 - DNA, 15 bp, Homo sapiens
agaattattcagtgt

SEQ ID NO: 2133628 - DNA, 15 bp, Homo sapiens
gaattattcagtgtg

SEQ ID NO: 2133629 - DNA, 15 bp, Homo sapiens
aattattcagtgtgc

SEQ ID NO: 2133630 - DNA, 15 bp, Homo sapiens
attattcagtgtgca

SEQ ID NO: 2133631 - DNA, 15 bp, Homo sapiens
ttattcagtgtgcac

SEQ ID NO: 2133632 - DNA, 15 bp, Homo sapiens
tattcagtgtgcacc

SEQ ID NO: 2133633 - DNA, 15 bp, Homo sapiens
attcagtgtgcacct

SEQ ID NO: 2133634 - DNA, 15 bp, Homo sapiens
ttcagtgtgcaccta

SEQ ID NO: 2133635 - DNA, 15 bp, Homo sapiens
tcagtgtgcacctac

SEQ ID NO: 2133636 - DNA, 15 bp, Homo sapiens
cagtgtgcacctaca

SEQ ID NO: 2133637 - DNA, 15 bp, Homo sapiens
agtgtgcacctacat

SEQ ID NO: 2133638 - DNA, 15 bp, Homo sapiens
gtgtgcacctacata

SEQ ID NO: 2133639 - DNA, 15 bp, Homo sapiens
tgtgcacctacataa

SEQ ID NO: 2133640 - DNA, 15 bp, Homo sapiens
gtgcacctacataat

SEQ ID NO: 2133641 - DNA, 15 bp, Homo sapiens
tgcacctacataatc

SEQ ID NO: 2133642 - DNA, 15 bp, Homo sapiens
gcacctacataatca

SEQ ID NO: 2133643 - DNA, 15 bp, Homo sapiens
cacctacataatcac

SEQ ID NO: 2133644 - DNA, 15 bp, Homo sapiens
acctacataatcact

SEQ ID NO: 2133645 - DNA, 15 bp, Homo sapiens
cctacataatcactg

SEQ ID NO: 2133646 - DNA, 15 bp, Homo sapiens
ctacataatcactgc

SEQ ID NO: 2133647 - DNA, 15 bp, Homo sapiens
tacataatcactgct

SEQ ID NO: 2133648 - DNA, 15 bp, Homo sapiens
acataatcactgctt

SEQ ID NO: 2133649 - DNA, 15 bp, Homo sapiens
cataatcactgctta

SEQ ID NO: 2133650 - DNA, 15 bp, Homo sapiens
ataatcactgcttag

SEQ ID NO: 2133651 - DNA, 15 bp, Homo sapiens
taatcactgcttaga

SEQ ID NO: 2133652 - DNA, 15 bp, Homo sapiens
aatcactgcttagat

SEQ ID NO: 2133653 - DNA, 15 bp, Homo sapiens
atcactgcttagatt

SEQ ID NO: 2133654 - DNA, 15 bp, Homo sapiens
tcactgcttagattc

SEQ ID NO: 2133655 - DNA, 15 bp, Homo sapiens
cactgcttagattct

SEQ ID NO: 2133656 - DNA, 15 bp, Homo sapiens
actgcttagattcta

SEQ ID NO: 2133657 - DNA, 15 bp, Homo sapiens
ctgcttagattctac

SEQ ID NO: 2133658 - DNA, 15 bp, Homo sapiens
tgcttagattctaca

SEQ ID NO: 2133659 - DNA, 15 bp, Homo sapiens
gcttagattctacaa

SEQ ID NO: 2133660 - DNA, 15 bp, Homo sapiens
cttagattctacaat

SEQ ID NO: 2133661 - DNA, 15 bp, Homo sapiens
ttagattctacaatt

SEQ ID NO: 2133662 - DNA, 15 bp, Homo sapiens
tagattctacaatta

SEQ ID NO: 2133663 - DNA, 15 bp, Homo sapiens
agattctacaattaa

SEQ ID NO: 2133664 - DNA, 15 bp, Homo sapiens
gattctacaattaat

SEQ ID NO: 2133665 - DNA, 15 bp, Homo sapiens
attctacaattaata

SEQ ID NO: 2133666 - DNA, 15 bp, Homo sapiens
ttctacaattaatat

SEQ ID NO: 2133667 - DNA, 15 bp, Homo sapiens
tctacaattaatatt

SEQ ID NO: 2133668 - DNA, 15 bp, Homo sapiens
ctacaattaatattt

SEQ ID NO: 2133669 - DNA, 15 bp, Homo sapiens
tacaattaatatttt

SEQ ID NO: 2133670 - DNA, 15 bp, Homo sapiens
acaattaatattttg

SEQ ID NO: 2133671 - DNA, 15 bp, Homo sapiens
caattaatattttgc

SEQ ID NO: 2133672 - DNA, 15 bp, Homo sapiens
aattaatattttgct

SEQ ID NO: 2133673 - DNA, 15 bp, Homo sapiens
attaatattttgcta

SEQ ID NO: 2133674 - DNA, 15 bp, Homo sapiens
ttaatattttgctat

SEQ ID NO: 2133675 - DNA, 15 bp, Homo sapiens
taatattttgctata

SEQ ID NO: 2133676 - DNA, 15 bp, Homo sapiens
aatattttgctatat

SEQ ID NO: 2133677 - DNA, 15 bp, Homo sapiens
atattttgctatatt

SEQ ID NO: 2133678 - DNA, 15 bp, Homo sapiens
tattttgctatattt

SEQ ID NO: 2133679 - DNA, 15 bp, Homo sapiens
attttgctatatttg

SEQ ID NO: 2133680 - DNA, 15 bp, Homo sapiens
ttttgctatatttga

SEQ ID NO: 2133681 - DNA, 15 bp, Homo sapiens
tttgctatatttgat

SEQ ID NO: 2133682 - DNA, 15 bp, Homo sapiens
ttgctatatttgatt

SEQ ID NO: 2133683 - DNA, 15 bp, Homo sapiens
tgctatatttgatta

SEQ ID NO: 2133684 - DNA, 15 bp, Homo sapiens
gctatatttgattaa

SEQ ID NO: 2133685 - DNA, 15 bp, Homo sapiens
ctatatttgattaaa

SEQ ID NO: 2133686 - DNA, 15 bp, Homo sapiens
tatatttgattaaac

SEQ ID NO: 2133687 - DNA, 15 bp, Homo sapiens
atatttgattaaacg

SEQ ID NO: 2133688 - DNA, 15 bp, Homo sapiens
tatttgattaaacgt

SEQ ID NO: 2133689 - DNA, 15 bp, Homo sapiens
atttgattaaacgtt

SEQ ID NO: 2133690 - DNA, 15 bp, Homo sapiens
tttgattaaacgttt

SEQ ID NO: 2133691 - DNA, 15 bp, Homo sapiens
ttgattaaacgtttt

SEQ ID NO: 2133692 - DNA, 15 bp, Homo sapiens
tgattaaacgttttc

SEQ ID NO: 2133693 - DNA, 15 bp, Homo sapiens
gattaaacgttttct

SEQ ID NO: 2133694 - DNA, 15 bp, Homo sapiens
attaaacgttttctg

SEQ ID NO: 2133695 - DNA, 15 bp, Homo sapiens
ttaaacgttttctgt

SEQ ID NO: 2133696 - DNA, 15 bp, Homo sapiens
taaacgttttctgta

SEQ ID NO: 2133697 - DNA, 15 bp, Homo sapiens
aaacgttttctgtaa

SEQ ID NO: 2133698 - DNA, 15 bp, Homo sapiens
aacgttttctgtaaa

SEQ ID NO: 2133699 - DNA, 15 bp, Homo sapiens
acgttttctgtaaaa

SEQ ID NO: 2133700 - DNA, 15 bp, Homo sapiens
cgttttctgtaaaag

SEQ ID NO: 2133701 - DNA, 15 bp, Homo sapiens
gttttctgtaaaaga

SEQ ID NO: 2133702 - DNA, 15 bp, Homo sapiens
ttttctgtaaaagaa

SEQ ID NO: 2133703 - DNA, 15 bp, Homo sapiens
tttctgtaaaagaaa

SEQ ID NO: 2133704 - DNA, 15 bp, Homo sapiens
ttctgtaaaagaaaa

SEQ ID NO: 2133705 - DNA, 15 bp, Homo sapiens
tctgtaaaagaaaaa

SEQ ID NO: 2133706 - DNA, 15 bp, Homo sapiens
ctgtaaaagaaaaat

SEQ ID NO: 2133707 - DNA, 15 bp, Homo sapiens
tgtaaaagaaaaata

SEQ ID NO: 2133708 - DNA, 15 bp, Homo sapiens
gtaaaagaaaaatat

SEQ ID NO: 2133709 - DNA, 15 bp, Homo sapiens
taaaagaaaaatatt

SEQ ID NO: 2133710 - DNA, 15 bp, Homo sapiens
aaaagaaaaatatta

SEQ ID NO: 2133711 - DNA, 15 bp, Homo sapiens
aaagaaaaatattat

SEQ ID NO: 2133712 - DNA, 15 bp, Homo sapiens
aagaaaaatattatt

SEQ ID NO: 2133713 - DNA, 15 bp, Homo sapiens
agaaaaatattatta

SEQ ID NO: 2133714 - DNA, 15 bp, Homo sapiens
gaaaaatattattat

SEQ ID NO: 2133715 - DNA, 15 bp, Homo sapiens
aaaaatattattatg

SEQ ID NO: 2133716 - DNA, 15 bp, Homo sapiens
aaaatattattatgt

SEQ ID NO: 2133717 - DNA, 15 bp, Homo sapiens
aaatattattatgta

SEQ ID NO: 2133718 - DNA, 15 bp, Homo sapiens
aatattattatgtac

SEQ ID NO: 2133719 - DNA, 15 bp, Homo sapiens
atattattatgtact

SEQ ID NO: 2133720 - DNA, 15 bp, Homo sapiens
tattattatgtacta

SEQ ID NO: 2133721 - DNA, 15 bp, Homo sapiens
attattatgtactat

SEQ ID NO: 2133722 - DNA, 15 bp, Homo sapiens
ttattatgtactatt

SEQ ID NO: 2133723 - DNA, 15 bp, Homo sapiens
tattatgtactattt

SEQ ID NO: 2133724 - DNA, 15 bp, Homo sapiens
attatgtactattta

SEQ ID NO: 2133725 - DNA, 15 bp, Homo sapiens
ttatgtactatttag

SEQ ID NO: 2133726 - DNA, 15 bp, Homo sapiens
tatgtactatttagg

SEQ ID NO: 2133727 - DNA, 15 bp, Homo sapiens
atgtactatttaggt

SEQ ID NO: 2133728 - DNA, 15 bp, Homo sapiens
tgtactatttaggtt

SEQ ID NO: 2133729 - DNA, 15 bp, Homo sapiens
gtactatttaggttt

SEQ ID NO: 2133730 - DNA, 15 bp, Homo sapiens
tactatttaggttta

SEQ ID NO: 2133731 - DNA, 15 bp, Homo sapiens
actatttaggtttat

SEQ ID NO: 2133732 - DNA, 15 bp, Homo sapiens
ctatttaggtttatg

SEQ ID NO: 2133733 - DNA, 15 bp, Homo sapiens
tatttaggtttatgg

SEQ ID NO: 2133734 - DNA, 15 bp, Homo sapiens
atttaggtttatggg

SEQ ID NO: 2133735 - DNA, 15 bp, Homo sapiens
tttaggtttatggga

SEQ ID NO: 2133736 - DNA, 15 bp, Homo sapiens
ttaggtttatgggaa

SEQ ID NO: 2133737 - DNA, 15 bp, Homo sapiens
taggtttatgggaat

SEQ ID NO: 2133738 - DNA, 15 bp, Homo sapiens
aggtttatgggaata

SEQ ID NO: 2133739 - DNA, 15 bp, Homo sapiens
ggtttatgggaataa

SEQ ID NO: 2133740 - DNA, 15 bp, Homo sapiens
gtttatgggaataat

SEQ ID NO: 2133741 - DNA, 15 bp, Homo sapiens
tttatgggaataatt

SEQ ID NO: 2133742 - DNA, 15 bp, Homo sapiens
ttatgggaataattg

SEQ ID NO: 2133743 - DNA, 15 bp, Homo sapiens
tatgggaataattgt

SEQ ID NO: 2133744 - DNA, 15 bp, Homo sapiens
atgggaataattgtt

SEQ ID NO: 2133745 - DNA, 15 bp, Homo sapiens
tgggaataattgtta

SEQ ID NO: 2133746 - DNA, 15 bp, Homo sapiens
gggaataattgttaa

SEQ ID NO: 2133747 - DNA, 15 bp, Homo sapiens
ggaataattgttaag

SEQ ID NO: 2133748 - DNA, 15 bp, Homo sapiens
gaataattgttaagt

SEQ ID NO: 2133749 - DNA, 15 bp, Homo sapiens
aataattgttaagtt

SEQ ID NO: 2133750 - DNA, 15 bp, Homo sapiens
ataattgttaagtta

SEQ ID NO: 2133751 - DNA, 15 bp, Homo sapiens
taattgttaagttaa

SEQ ID NO: 2133752 - DNA, 15 bp, Homo sapiens
aattgttaagttaaa

SEQ ID NO: 2133753 - DNA, 15 bp, Homo sapiens
attgttaagttaaag

SEQ ID NO: 2133754 - DNA, 15 bp, Homo sapiens
ttgttaagttaaagt

SEQ ID NO: 2133755 - DNA, 15 bp, Homo sapiens
tgttaagttaaagtg

SEQ ID NO: 2133756 - DNA, 15 bp, Homo sapiens
gttaagttaaagtgt

SEQ ID NO: 2133757 - DNA, 15 bp, Homo sapiens
ttaagttaaagtgta

SEQ ID NO: 2133758 - DNA, 15 bp, Homo sapiens
taagttaaagtgtat

SEQ ID NO: 2133759 - DNA, 15 bp, Homo sapiens
aagttaaagtgtatg

SEQ ID NO: 2133760 - DNA, 15 bp, Homo sapiens
agttaaagtgtatga

SEQ ID NO: 2133761 - DNA, 15 bp, Homo sapiens
gttaaagtgtatgaa

SEQ ID NO: 2133762 - DNA, 15 bp, Homo sapiens
ttaaagtgtatgaac

SEQ ID NO: 2133763 - DNA, 15 bp, Homo sapiens
taaagtgtatgaaca

SEQ ID NO: 2133764 - DNA, 15 bp, Homo sapiens
aaagtgtatgaacaa

SEQ ID NO: 2133765 - DNA, 15 bp, Homo sapiens
aagtgtatgaacaaa

SEQ ID NO: 2133766 - DNA, 15 bp, Homo sapiens
agtgtatgaacaaac

SEQ ID NO: 2133767 - DNA, 15 bp, Homo sapiens
gtgtatgaacaaacc

SEQ ID NO: 2133768 - DNA, 15 bp, Homo sapiens
tgtatgaacaaacct

SEQ ID NO: 2133769 - DNA, 15 bp, Homo sapiens
gtatgaacaaacctg

SEQ ID NO: 2133770 - DNA, 15 bp, Homo sapiens
tatgaacaaacctgg

SEQ ID NO: 2133771 - DNA, 15 bp, Homo sapiens
atgaacaaacctgga

SEQ ID NO: 2133772 - DNA, 15 bp, Homo sapiens
tgaacaaacctggaa

SEQ ID NO: 2133773 - DNA, 15 bp, Homo sapiens
gaacaaacctggaat

SEQ ID NO: 2133774 - DNA, 15 bp, Homo sapiens
aacaaacctggaatg

SEQ ID NO: 2133775 - DNA, 15 bp, Homo sapiens
acaaacctggaatga

SEQ ID NO: 2133776 - DNA, 15 bp, Homo sapiens
caaacctggaatgaa

SEQ ID NO: 2133777 - DNA, 15 bp, Homo sapiens
aaacctggaatgaaa

SEQ ID NO: 2133778 - DNA, 15 bp, Homo sapiens
aacctggaatgaaat

SEQ ID NO: 2133779 - DNA, 15 bp, Homo sapiens
acctggaatgaaatc

SEQ ID NO: 2133780 - DNA, 15 bp, Homo sapiens
cctggaatgaaatct

SEQ ID NO: 2133781 - DNA, 15 bp, Homo sapiens
ctggaatgaaatctg

SEQ ID NO: 2133782 - DNA, 15 bp, Homo sapiens
tggaatgaaatctgt

SEQ ID NO: 2133783 - DNA, 15 bp, Homo sapiens
ggaatgaaatctgtt

SEQ ID NO: 2133784 - DNA, 15 bp, Homo sapiens
gaatgaaatctgttt

SEQ ID NO: 2133785 - DNA, 15 bp, Homo sapiens
aatgaaatctgtttg

SEQ ID NO: 2133786 - DNA, 15 bp, Homo sapiens
atgaaatctgtttgc

SEQ ID NO: 2133787 - DNA, 15 bp, Homo sapiens
tgaaatctgtttgcc

SEQ ID NO: 2133788 - DNA, 15 bp, Homo sapiens
gaaatctgtttgcct

SEQ ID NO: 2133789 - DNA, 15 bp, Homo sapiens
aaatctgtttgccta

SEQ ID NO: 2133790 - DNA, 15 bp, Homo sapiens
aatctgtttgcctac

SEQ ID NO: 2133791 - DNA, 15 bp, Homo sapiens
atctgtttgcctaca

SEQ ID NO: 2133792 - DNA, 15 bp, Homo sapiens
tctgtttgcctacat

SEQ ID NO: 2133793 - DNA, 15 bp, Homo sapiens
ctgtttgcctacatc

SEQ ID NO: 2133794 - DNA, 15 bp, Homo sapiens
tgtttgcctacatct

SEQ ID NO: 2133795 - DNA, 15 bp, Homo sapiens
gtttgcctacatcta

SEQ ID NO: 2133796 - DNA, 15 bp, Homo sapiens
tttgcctacatctat

SEQ ID NO: 2133797 - DNA, 15 bp, Homo sapiens
ttgcctacatctata

SEQ ID NO: 2133798 - DNA, 15 bp, Homo sapiens
tgcctacatctataa

SEQ ID NO: 2133799 - DNA, 15 bp, Homo sapiens
gcctacatctataat

SEQ ID NO: 2133800 - DNA, 15 bp, Homo sapiens
cctacatctataata

SEQ ID NO: 2133801 - DNA, 15 bp, Homo sapiens
ctacatctataatac

SEQ ID NO: 2133802 - DNA, 15 bp, Homo sapiens
tacatctataataca

SEQ ID NO: 2133803 - DNA, 15 bp, Homo sapiens
acatctataatacaa

SEQ ID NO: 2133804 - DNA, 15 bp, Homo sapiens
catctataatacaac

SEQ ID NO: 2133805 - DNA, 15 bp, Homo sapiens
atctataatacaact

SEQ ID NO: 2133806 - DNA, 15 bp, Homo sapiens
tctataatacaacta

SEQ ID NO: 2133807 - DNA, 15 bp, Homo sapiens
ctataatacaactat

SEQ ID NO: 2133808 - DNA, 15 bp, Homo sapiens
tataatacaactata

SEQ ID NO: 2133809 - DNA, 15 bp, Homo sapiens
ataatacaactataa

SEQ ID NO: 2133810 - DNA, 15 bp, Homo sapiens
taatacaactataaa

SEQ ID NO: 2133811 - DNA, 15 bp, Homo sapiens
aatacaactataaaa

SEQ ID NO: 2133812 - DNA, 15 bp, Homo sapiens
atacaactataaaac

SEQ ID NO: 2133813 - DNA, 15 bp, Homo sapiens
tacaactataaaaca

SEQ ID NO: 2133814 - DNA, 15 bp, Homo sapiens
acaactataaaacat

SEQ ID NO: 2133815 - DNA, 15 bp, Homo sapiens
caactataaaacata

SEQ ID NO: 2133816 - DNA, 15 bp, Homo sapiens
aactataaaacatag

SEQ ID NO: 2133817 - DNA, 15 bp, Homo sapiens
actataaaacatagc

SEQ ID NO: 2133818 - DNA, 15 bp, Homo sapiens
ctataaaacatagca

SEQ ID NO: 2133819 - DNA, 15 bp, Homo sapiens
tataaaacatagcag

SEQ ID NO: 2133820 - DNA, 15 bp, Homo sapiens
ataaaacatagcaga

SEQ ID NO: 2133821 - DNA, 15 bp, Homo sapiens
taaaacatagcagat

SEQ ID NO: 2133822 - DNA, 15 bp, Homo sapiens
aaaacatagcagatg

SEQ ID NO: 2133823 - DNA, 15 bp, Homo sapiens
aaacatagcagatgt

SEQ ID NO: 2133824 - DNA, 15 bp, Homo sapiens
aacatagcagatgta

SEQ ID NO: 2133825 - DNA, 15 bp, Homo sapiens
acatagcagatgtac

SEQ ID NO: 2133826 - DNA, 15 bp, Homo sapiens
catagcagatgtaca

SEQ ID NO: 2133827 - DNA, 15 bp, Homo sapiens
atagcagatgtacaa

SEQ ID NO: 2133828 - DNA, 15 bp, Homo sapiens
tagcagatgtacaaa

SEQ ID NO: 2133829 - DNA, 15 bp, Homo sapiens
agcagatgtacaaat

SEQ ID NO: 2133830 - DNA, 15 bp, Homo sapiens
gcagatgtacaaatt

SEQ ID NO: 2133831 - DNA, 15 bp, Homo sapiens
cagatgtacaaatta

SEQ ID NO: 2133832 - DNA, 15 bp, Homo sapiens
agatgtacaaattag

SEQ ID NO: 2133833 - DNA, 15 bp, Homo sapiens
gatgtacaaattagt

SEQ ID NO: 2133834 - DNA, 15 bp, Homo sapiens
atgtacaaattagta

SEQ ID NO: 2133835 - DNA, 15 bp, Homo sapiens
tgtacaaattagtag

SEQ ID NO: 2133836 - DNA, 15 bp, Homo sapiens
gtacaaattagtagt

SEQ ID NO: 2133837 - DNA, 15 bp, Homo sapiens
tacaaattagtagtt

SEQ ID NO: 2133838 - DNA, 15 bp, Homo sapiens
acaaattagtagtta

SEQ ID NO: 2133839 - DNA, 15 bp, Homo sapiens
caaattagtagttaa

SEQ ID NO: 2133840 - DNA, 15 bp, Homo sapiens
aaattagtagttaat

SEQ ID NO: 2133841 - DNA, 15 bp, Homo sapiens
aattagtagttaata

SEQ ID NO: 2133842 - DNA, 15 bp, Homo sapiens
attagtagttaatag

SEQ ID NO: 2133843 - DNA, 15 bp, Homo sapiens
ttagtagttaataga

SEQ ID NO: 2133844 - DNA, 15 bp, Homo sapiens
tagtagttaatagat

SEQ ID NO: 2133845 - DNA, 15 bp, Homo sapiens
agtagttaatagata

SEQ ID NO: 2133846 - DNA, 15 bp, Homo sapiens
gtagttaatagataa

SEQ ID NO: 2133847 - DNA, 15 bp, Homo sapiens
tagttaatagataac

SEQ ID NO: 2133848 - DNA, 15 bp, Homo sapiens
agttaatagataact

SEQ ID NO: 2133849 - DNA, 15 bp, Homo sapiens
gttaatagataacta

SEQ ID NO: 2133850 - DNA, 15 bp, Homo sapiens
ttaatagataactaa

SEQ ID NO: 2133851 - DNA, 15 bp, Homo sapiens
taatagataactaaa

SEQ ID NO: 2133852 - DNA, 15 bp, Homo sapiens
aatagataactaaaa

SEQ ID NO: 2133853 - DNA, 15 bp, Homo sapiens
atagataactaaaat

SEQ ID NO: 2133854 - DNA, 15 bp, Homo sapiens
tagataactaaaatg

SEQ ID NO: 2133855 - DNA, 15 bp, Homo sapiens
agataactaaaatgc

SEQ ID NO: 2133856 - DNA, 15 bp, Homo sapiens
gataactaaaatgca

SEQ ID NO: 2133857 - DNA, 15 bp, Homo sapiens
ataactaaaatgcaa

SEQ ID NO: 2133858 - DNA, 15 bp, Homo sapiens
taactaaaatgcaaa

SEQ ID NO: 2133859 - DNA, 15 bp, Homo sapiens
aactaaaatgcaaat

SEQ ID NO: 2133860 - DNA, 15 bp, Homo sapiens
actaaaatgcaaata

SEQ ID NO: 2133861 - DNA, 15 bp, Homo sapiens
ctaaaatgcaaatat

SEQ ID NO: 2133862 - DNA, 15 bp, Homo sapiens
taaaatgcaaatatg

SEQ ID NO: 2133863 - DNA, 15 bp, Homo sapiens
aaaatgcaaatatgg

SEQ ID NO: 2133864 - DNA, 15 bp, Homo sapiens
aaatgcaaatatggc

SEQ ID NO: 2133865 - DNA, 15 bp, Homo sapiens
aatgcaaatatggca

SEQ ID NO: 2133866 - DNA, 15 bp, Homo sapiens
atgcaaatatggcac

SEQ ID NO: 2133867 - DNA, 15 bp, Homo sapiens
tgcaaatatggcact

SEQ ID NO: 2133868 - DNA, 15 bp, Homo sapiens
gcaaatatggcacta

SEQ ID NO: 2133869 - DNA, 15 bp, Homo sapiens
caaatatggcactac

SEQ ID NO: 2133870 - DNA, 15 bp, Homo sapiens
aaatatggcactact

SEQ ID NO: 2133871 - DNA, 15 bp, Homo sapiens
aatatggcactacta

SEQ ID NO: 2133872 - DNA, 15 bp, Homo sapiens
atatggcactactat

SEQ ID NO: 2133873 - DNA, 15 bp, Homo sapiens
tatggcactactatt

SEQ ID NO: 2133874 - DNA, 15 bp, Homo sapiens
atggcactactatta

SEQ ID NO: 2133875 - DNA, 15 bp, Homo sapiens
tggcactactattat

SEQ ID NO: 2133876 - DNA, 15 bp, Homo sapiens
ggcactactattata

SEQ ID NO: 2133877 - DNA, 15 bp, Homo sapiens
gcactactattatag

SEQ ID NO: 2133878 - DNA, 15 bp, Homo sapiens
cactactattatagt

SEQ ID NO: 2133879 - DNA, 15 bp, Homo sapiens
actactattatagta

SEQ ID NO: 2133880 - DNA, 15 bp, Homo sapiens
ctactattatagtat

SEQ ID NO: 2133881 - DNA, 15 bp, Homo sapiens
tactattatagtatt

SEQ ID NO: 2133882 - DNA, 15 bp, Homo sapiens
actattatagtatta

SEQ ID NO: 2133883 - DNA, 15 bp, Homo sapiens
ctattatagtattat

SEQ ID NO: 2133884 - DNA, 15 bp, Homo sapiens
tattatagtattata

SEQ ID NO: 2133885 - DNA, 15 bp, Homo sapiens
attatagtattatag

SEQ ID NO: 2133886 - DNA, 15 bp, Homo sapiens
ttatagtattatagt

SEQ ID NO: 2133887 - DNA, 15 bp, Homo sapiens
tatagtattatagtt

SEQ ID NO: 2133888 - DNA, 15 bp, Homo sapiens
atagtattatagttt

SEQ ID NO: 2133889 - DNA, 15 bp, Homo sapiens
tagtattatagtttc

SEQ ID NO: 2133890 - DNA, 15 bp, Homo sapiens
agtattatagtttct

SEQ ID NO: 2133891 - DNA, 15 bp, Homo sapiens
gtattatagtttctt

SEQ ID NO: 2133892 - DNA, 15 bp, Homo sapiens
tattatagtttcttt

SEQ ID NO: 2133893 - DNA, 15 bp, Homo sapiens
attatagtttctttt

SEQ ID NO: 2133894 - DNA, 15 bp, Homo sapiens
ttatagtttcttttg

SEQ ID NO: 2133895 - DNA, 15 bp, Homo sapiens
tatagtttcttttga

SEQ ID NO: 2133896 - DNA, 15 bp, Homo sapiens
atagtttcttttgag

SEQ ID NO: 2133897 - DNA, 15 bp, Homo sapiens
tagtttcttttgagt

SEQ ID NO: 2133898 - DNA, 15 bp, Homo sapiens
agtttcttttgagtg

SEQ ID NO: 2133899 - DNA, 15 bp, Homo sapiens
gtttcttttgagtgg

SEQ ID NO: 2133900 - DNA, 15 bp, Homo sapiens
tttcttttgagtggc

SEQ ID NO: 2133901 - DNA, 15 bp, Homo sapiens
ttcttttgagtggcg

SEQ ID NO: 2133902 - DNA, 15 bp, Homo sapiens
tcttttgagtggcgt

SEQ ID NO: 2133903 - DNA, 15 bp, Homo sapiens
cttttgagtggcgtg

SEQ ID NO: 2133904 - DNA, 15 bp, Homo sapiens
ttttgagtggcgtgt

SEQ ID NO: 2133905 - DNA, 15 bp, Homo sapiens
tttgagtggcgtgtc

SEQ ID NO: 2133906 - DNA, 15 bp, Homo sapiens
ttgagtggcgtgtct

SEQ ID NO: 2133907 - DNA, 15 bp, Homo sapiens
tgagtggcgtgtctg

SEQ ID NO: 2133908 - DNA, 15 bp, Homo sapiens
gagtggcgtgtctgt

SEQ ID NO: 2133909 - DNA, 15 bp, Homo sapiens
agtggcgtgtctgta

SEQ ID NO: 2133910 - DNA, 15 bp, Homo sapiens
gtggcgtgtctgtaa

SEQ ID NO: 2133911 - DNA, 15 bp, Homo sapiens
tggcgtgtctgtaat

SEQ ID NO: 2133912 - DNA, 15 bp, Homo sapiens
ggcgtgtctgtaata

SEQ ID NO: 2133913 - DNA, 15 bp, Homo sapiens
gcgtgtctgtaatat

SEQ ID NO: 2133914 - DNA, 15 bp, Homo sapiens
cgtgtctgtaatatc

SEQ ID NO: 2133915 - DNA, 15 bp, Homo sapiens
gtgtctgtaatatca

SEQ ID NO: 2133916 - DNA, 15 bp, Homo sapiens
tgtctgtaatatcac

SEQ ID NO: 2133917 - DNA, 15 bp, Homo sapiens
gtctgtaatatcaca

SEQ ID NO: 2133918 - DNA, 15 bp, Homo sapiens
tctgtaatatcacat

SEQ ID NO: 2133919 - DNA, 15 bp, Homo sapiens
ctgtaatatcacatg

SEQ ID NO: 2133920 - DNA, 15 bp, Homo sapiens
tgtaatatcacatgc

SEQ ID NO: 2133921 - DNA, 15 bp, Homo sapiens
gtaatatcacatgct

SEQ ID NO: 2133922 - DNA, 15 bp, Homo sapiens
taatatcacatgctg

SEQ ID NO: 2133923 - DNA, 15 bp, Homo sapiens
aatatcacatgctgt

SEQ ID NO: 2133924 - DNA, 15 bp, Homo sapiens
atatcacatgctgtg

SEQ ID NO: 2133925 - DNA, 15 bp, Homo sapiens
tatcacatgctgtgt

SEQ ID NO: 2133926 - DNA, 15 bp, Homo sapiens
atcacatgctgtgtt

SEQ ID NO: 2133927 - DNA, 15 bp, Homo sapiens
tcacatgctgtgttg

SEQ ID NO: 2133928 - DNA, 15 bp, Homo sapiens
cacatgctgtgttga

SEQ ID NO: 2133929 - DNA, 15 bp, Homo sapiens
acatgctgtgttgat

SEQ ID NO: 2133930 - DNA, 15 bp, Homo sapiens
catgctgtgttgatg

SEQ ID NO: 2133931 - DNA, 15 bp, Homo sapiens
atgctgtgttgatgc

SEQ ID NO: 2133932 - DNA, 15 bp, Homo sapiens
tgctgtgttgatgca

SEQ ID NO: 2133933 - DNA, 15 bp, Homo sapiens
gctgtgttgatgcac

SEQ ID NO: 2133934 - DNA, 15 bp, Homo sapiens
ctgtgttgatgcact

SEQ ID NO: 2133935 - DNA, 15 bp, Homo sapiens
tgtgttgatgcactt

SEQ ID NO: 2133936 - DNA, 15 bp, Homo sapiens
gtgttgatgcacttc

SEQ ID NO: 2133937 - DNA, 15 bp, Homo sapiens
tgttgatgcacttca

SEQ ID NO: 2133938 - DNA, 15 bp, Homo sapiens
gttgatgcacttcac

SEQ ID NO: 2133939 - DNA, 15 bp, Homo sapiens
ttgatgcacttcacc

SEQ ID NO: 2133940 - DNA, 15 bp, Homo sapiens
tgatgcacttcacca

SEQ ID NO: 2133941 - DNA, 15 bp, Homo sapiens
gatgcacttcaccaa

SEQ ID NO: 2133942 - DNA, 15 bp, Homo sapiens
atgcacttcaccaaa

SEQ ID NO: 2133943 - DNA, 15 bp, Homo sapiens
tgcacttcaccaaac

SEQ ID NO: 2133944 - DNA, 15 bp, Homo sapiens
gcacttcaccaaact

SEQ ID NO: 2133945 - DNA, 15 bp, Homo sapiens
cacttcaccaaactg

SEQ ID NO: 2133946 - DNA, 15 bp, Homo sapiens
acttcaccaaactgc

SEQ ID NO: 2133947 - DNA, 15 bp, Homo sapiens
cttcaccaaactgct

SEQ ID NO: 2133948 - DNA, 15 bp, Homo sapiens
ttcaccaaactgctg

SEQ ID NO: 2133949 - DNA, 15 bp, Homo sapiens
tcaccaaactgctgt

SEQ ID NO: 2133950 - DNA, 15 bp, Homo sapiens
caccaaactgctgtt

SEQ ID NO: 2133951 - DNA, 15 bp, Homo sapiens
accaaactgctgttt

SEQ ID NO: 2133952 - DNA, 15 bp, Homo sapiens
ccaaactgctgtttt

SEQ ID NO: 2133953 - DNA, 15 bp, Homo sapiens
caaactgctgttttc

SEQ ID NO: 2133954 - DNA, 15 bp, Homo sapiens
aaactgctgttttca

SEQ ID NO: 2133955 - DNA, 15 bp, Homo sapiens
aactgctgttttcaa

SEQ ID NO: 2133956 - DNA, 15 bp, Homo sapiens
actgctgttttcaaa

SEQ ID NO: 2133957 - DNA, 15 bp, Homo sapiens
ctgctgttttcaaac

SEQ ID NO: 2133958 - DNA, 15 bp, Homo sapiens
tgctgttttcaaact

SEQ ID NO: 2133959 - DNA, 15 bp, Homo sapiens
gctgttttcaaactg

SEQ ID NO: 2133960 - DNA, 15 bp, Homo sapiens
ctgttttcaaactgc

SEQ ID NO: 2133961 - DNA, 15 bp, Homo sapiens
tgttttcaaactgct

SEQ ID NO: 2133962 - DNA, 15 bp, Homo sapiens
gttttcaaactgctt

SEQ ID NO: 2133963 - DNA, 15 bp, Homo sapiens
ttttcaaactgcttt

SEQ ID NO: 2133964 - DNA, 15 bp, Homo sapiens
tttcaaactgcttta

SEQ ID NO: 2133965 - DNA, 15 bp, Homo sapiens
ttcaaactgctttaa

SEQ ID NO: 2133966 - DNA, 15 bp, Homo sapiens
tcaaactgctttaaa

SEQ ID NO: 2133967 - DNA, 15 bp, Homo sapiens
caaactgctttaaat

SEQ ID NO: 2133968 - DNA, 15 bp, Homo sapiens
aaactgctttaaatc

SEQ ID NO: 2133969 - DNA, 15 bp, Homo sapiens
aactgctttaaatcc

SEQ ID NO: 2133970 - DNA, 15 bp, Homo sapiens
actgctttaaatcct

SEQ ID NO: 2133971 - DNA, 15 bp, Homo sapiens
ctgctttaaatcctg

SEQ ID NO: 2133972 - DNA, 15 bp, Homo sapiens
tgctttaaatcctgc

SEQ ID NO: 2133973 - DNA, 15 bp, Homo sapiens
gctttaaatcctgcc

SEQ ID NO: 2133974 - DNA, 15 bp, Homo sapiens
ctttaaatcctgcca

SEQ ID NO: 2133975 - DNA, 15 bp, Homo sapiens
tttaaatcctgccat

SEQ ID NO: 2133976 - DNA, 15 bp, Homo sapiens
ttaaatcctgccatt

SEQ ID NO: 2133977 - DNA, 15 bp, Homo sapiens
taaatcctgccatta

SEQ ID NO: 2133978 - DNA, 15 bp, Homo sapiens
aaatcctgccattat

SEQ ID NO: 2133979 - DNA, 15 bp, Homo sapiens
aatcctgccattata

SEQ ID NO: 2133980 - DNA, 15 bp, Homo sapiens
atcctgccattatag

SEQ ID NO: 2133981 - DNA, 15 bp, Homo sapiens
tcctgccattatagc

SEQ ID NO: 2133982 - DNA, 15 bp, Homo sapiens
cctgccattatagca

SEQ ID NO: 2133983 - DNA, 15 bp, Homo sapiens
ctgccattatagcac

SEQ ID NO: 2133984 - DNA, 15 bp, Homo sapiens
tgccattatagcaca

SEQ ID NO: 2133985 - DNA, 15 bp, Homo sapiens
gccattatagcacat

SEQ ID NO: 2133986 - DNA, 15 bp, Homo sapiens
ccattatagcacata

SEQ ID NO: 2133987 - DNA, 15 bp, Homo sapiens
cattatagcacatag

SEQ ID NO: 2133988 - DNA, 15 bp, Homo sapiens
attatagcacatagc

SEQ ID NO: 2133989 - DNA, 15 bp, Homo sapiens
ttatagcacatagca

SEQ ID NO: 2133990 - DNA, 15 bp, Homo sapiens
tatagcacatagcaa

SEQ ID NO: 2133991 - DNA, 15 bp, Homo sapiens
atagcacatagcaat

SEQ ID NO: 2133992 - DNA, 15 bp, Homo sapiens
tagcacatagcaatg

SEQ ID NO: 2133993 - DNA, 15 bp, Homo sapiens
agcacatagcaatgc

SEQ ID NO: 2133994 - DNA, 15 bp, Homo sapiens
gcacatagcaatgct

SEQ ID NO: 2133995 - DNA, 15 bp, Homo sapiens
cacatagcaatgcta

SEQ ID NO: 2133996 - DNA, 15 bp, Homo sapiens
acatagcaatgctat

SEQ ID NO: 2133997 - DNA, 15 bp, Homo sapiens
catagcaatgctatt

SEQ ID NO: 2133998 - DNA, 15 bp, Homo sapiens
atagcaatgctattt

SEQ ID NO: 2133999 - DNA, 15 bp, Homo sapiens
tagcaatgctatttc

SEQ ID NO: 2134000 - DNA, 15 bp, Homo sapiens
agcaatgctatttca

SEQ ID NO: 2134001 - DNA, 15 bp, Homo sapiens
gcaatgctatttcac

SEQ ID NO: 2134002 - DNA, 15 bp, Homo sapiens
caatgctatttcact

SEQ ID NO: 2134003 - DNA, 15 bp, Homo sapiens
aatgctatttcactt

SEQ ID NO: 2134004 - DNA, 15 bp, Homo sapiens
atgctatttcacttt

SEQ ID NO: 2134005 - DNA, 15 bp, Homo sapiens
tgctatttcactttc

SEQ ID NO: 2134006 - DNA, 15 bp, Homo sapiens
gctatttcactttca

SEQ ID NO: 2134007 - DNA, 15 bp, Homo sapiens
ctatttcactttcat

SEQ ID NO: 2134008 - DNA, 15 bp, Homo sapiens
tatttcactttcatt

SEQ ID NO: 2134009 - DNA, 15 bp, Homo sapiens
atttcactttcattt

SEQ ID NO: 2134010 - DNA, 15 bp, Homo sapiens
tttcactttcatttg

SEQ ID NO: 2134011 - DNA, 15 bp, Homo sapiens
ttcactttcatttgg

SEQ ID NO: 2134012 - DNA, 15 bp, Homo sapiens
tcactttcatttggc

SEQ ID NO: 2134013 - DNA, 15 bp, Homo sapiens
cactttcatttggca

SEQ ID NO: 2134014 - DNA, 15 bp, Homo sapiens
actttcatttggcac

SEQ ID NO: 2134015 - DNA, 15 bp, Homo sapiens
ctttcatttggcaca

SEQ ID NO: 2134016 - DNA, 15 bp, Homo sapiens
tttcatttggcacaa

SEQ ID NO: 2134017 - DNA, 15 bp, Homo sapiens
ttcatttggcacaaa

SEQ ID NO: 2134018 - DNA, 15 bp, Homo sapiens
tcatttggcacaaaa

SEQ ID NO: 2134019 - DNA, 15 bp, Homo sapiens
catttggcacaaaac

SEQ ID NO: 2134020 - DNA, 15 bp, Homo sapiens
atttggcacaaaaca

SEQ ID NO: 2134021 - DNA, 15 bp, Homo sapiens
tttggcacaaaacac

SEQ ID NO: 2134022 - DNA, 15 bp, Homo sapiens
ttggcacaaaacaca

SEQ ID NO: 2134023 - DNA, 15 bp, Homo sapiens
tggcacaaaacacat

SEQ ID NO: 2134024 - DNA, 15 bp, Homo sapiens
ggcacaaaacacatt

SEQ ID NO: 2134025 - DNA, 15 bp, Homo sapiens
gcacaaaacacattt

SEQ ID NO: 2134026 - DNA, 15 bp, Homo sapiens
cacaaaacacattta

SEQ ID NO: 2134027 - DNA, 15 bp, Homo sapiens
acaaaacacatttat

SEQ ID NO: 2134028 - DNA, 15 bp, Homo sapiens
caaaacacatttata

SEQ ID NO: 2134029 - DNA, 15 bp, Homo sapiens
aaaacacatttatat

SEQ ID NO: 2134030 - DNA, 15 bp, Homo sapiens
aaacacatttatata

SEQ ID NO: 2134031 - DNA, 15 bp, Homo sapiens
aacacatttatatat

SEQ ID NO: 2134032 - DNA, 15 bp, Homo sapiens
acacatttatatatt

SEQ ID NO: 2134033 - DNA, 15 bp, Homo sapiens
cacatttatatattg

SEQ ID NO: 2134034 - DNA, 15 bp, Homo sapiens
acatttatatattgt

SEQ ID NO: 2134035 - DNA, 15 bp, Homo sapiens
catttatatattgtt

SEQ ID NO: 2134036 - DNA, 15 bp, Homo sapiens
atttatatattgttt

SEQ ID NO: 2134037 - DNA, 15 bp, Homo sapiens
tttatatattgtttg

SEQ ID NO: 2134038 - DNA, 15 bp, Homo sapiens
ttatatattgtttgc

SEQ ID NO: 2134039 - DNA, 15 bp, Homo sapiens
tatatattgtttgct

SEQ ID NO: 2134040 - DNA, 15 bp, Homo sapiens
atatattgtttgctt

SEQ ID NO: 2134041 - DNA, 15 bp, Homo sapiens
tatattgtttgcttc

SEQ ID NO: 2134042 - DNA, 15 bp, Homo sapiens
atattgtttgcttct

SEQ ID NO: 2134043 - DNA, 15 bp, Homo sapiens
tattgtttgcttctc

SEQ ID NO: 2134044 - DNA, 15 bp, Homo sapiens
attgtttgcttctct

SEQ ID NO: 2134045 - DNA, 15 bp, Homo sapiens
ttgtttgcttctctt

SEQ ID NO: 2134046 - DNA, 15 bp, Homo sapiens
tgtttgcttctcttc

SEQ ID NO: 2134047 - DNA, 15 bp, Homo sapiens
gtttgcttctcttct

SEQ ID NO: 2134048 - DNA, 15 bp, Homo sapiens
tttgcttctcttctt

SEQ ID NO: 2134049 - DNA, 15 bp, Homo sapiens
ttgcttctcttcttt

SEQ ID NO: 2134050 - DNA, 15 bp, Homo sapiens
tgcttctcttctttt

SEQ ID NO: 2134051 - DNA, 15 bp, Homo sapiens
gcttctcttcttttc

SEQ ID NO: 2134052 - DNA, 15 bp, Homo sapiens
cttctcttcttttct

SEQ ID NO: 2134053 - DNA, 15 bp, Homo sapiens
ttctcttcttttctg

SEQ ID NO: 2134054 - DNA, 15 bp, Homo sapiens
tctcttcttttctgt

SEQ ID NO: 2134055 - DNA, 15 bp, Homo sapiens
ctcttcttttctgta

SEQ ID NO: 2134056 - DNA, 15 bp, Homo sapiens
tcttcttttctgtaa

SEQ ID NO: 2134057 - DNA, 15 bp, Homo sapiens
cttcttttctgtaat

SEQ ID NO: 2134058 - DNA, 15 bp, Homo sapiens
ttcttttctgtaatc

SEQ ID NO: 2134059 - DNA, 15 bp, Homo sapiens
tcttttctgtaatcc

SEQ ID NO: 2134060 - DNA, 15 bp, Homo sapiens
cttttctgtaatccc

SEQ ID NO: 2134061 - DNA, 15 bp, Homo sapiens
ttttctgtaatcccc

SEQ ID NO: 2134062 - DNA, 15 bp, Homo sapiens
tttctgtaatcccca

SEQ ID NO: 2134063 - DNA, 15 bp, Homo sapiens
ttctgtaatccccag

SEQ ID NO: 2134064 - DNA, 15 bp, Homo sapiens
tctgtaatccccagg

SEQ ID NO: 2134065 - DNA, 15 bp, Homo sapiens
ctgtaatccccaggc

SEQ ID NO: 2134066 - DNA, 15 bp, Homo sapiens
tgtaatccccaggca

SEQ ID NO: 2134067 - DNA, 15 bp, Homo sapiens
gtaatccccaggcaa

SEQ ID NO: 2134068 - DNA, 15 bp, Homo sapiens
taatccccaggcaac

SEQ ID NO: 2134069 - DNA, 15 bp, Homo sapiens
aatccccaggcaaca

SEQ ID NO: 2134070 - DNA, 15 bp, Homo sapiens
atccccaggcaacaa

SEQ ID NO: 2134071 - DNA, 15 bp, Homo sapiens
tccccaggcaacaaa

SEQ ID NO: 2134072 - DNA, 15 bp, Homo sapiens
ccccaggcaacaaaa

SEQ ID NO: 2134073 - DNA, 15 bp, Homo sapiens
cccaggcaacaaaac

SEQ ID NO: 2134074 - DNA, 15 bp, Homo sapiens
ccaggcaacaaaact

SEQ ID NO: 2134075 - DNA, 15 bp, Homo sapiens
caggcaacaaaacta

SEQ ID NO: 2134076 - DNA, 15 bp, Homo sapiens
aggcaacaaaactag

SEQ ID NO: 2134077 - DNA, 15 bp, Homo sapiens
ggcaacaaaactaga

SEQ ID NO: 2134078 - DNA, 15 bp, Homo sapiens
gcaacaaaactagaa

SEQ ID NO: 2134079 - DNA, 15 bp, Homo sapiens
caacaaaactagaac

SEQ ID NO: 2134080 - DNA, 15 bp, Homo sapiens
aacaaaactagaaca

SEQ ID NO: 2134081 - DNA, 15 bp, Homo sapiens
acaaaactagaacat

SEQ ID NO: 2134082 - DNA, 15 bp, Homo sapiens
caaaactagaacatt

SEQ ID NO: 2134083 - DNA, 15 bp, Homo sapiens
aaaactagaacattt

SEQ ID NO: 2134084 - DNA, 15 bp, Homo sapiens
aaactagaacatttg

SEQ ID NO: 2134085 - DNA, 15 bp, Homo sapiens
aactagaacatttgc

SEQ ID NO: 2134086 - DNA, 15 bp, Homo sapiens
actagaacatttgcc

SEQ ID NO: 2134087 - DNA, 15 bp, Homo sapiens
ctagaacatttgcca

SEQ ID NO: 2134088 - DNA, 15 bp, Homo sapiens
tagaacatttgccac

SEQ ID NO: 2134089 - DNA, 15 bp, Homo sapiens
agaacatttgccact

SEQ ID NO: 2134090 - DNA, 15 bp, Homo sapiens
gaacatttgccacta

SEQ ID NO: 2134091 - DNA, 15 bp, Homo sapiens
aacatttgccactaa

SEQ ID NO: 2134092 - DNA, 15 bp, Homo sapiens
acatttgccactaat

SEQ ID NO: 2134093 - DNA, 15 bp, Homo sapiens
catttgccactaatc

SEQ ID NO: 2134094 - DNA, 15 bp, Homo sapiens
atttgccactaatct

SEQ ID NO: 2134095 - DNA, 15 bp, Homo sapiens
tttgccactaatctg

SEQ ID NO: 2134096 - DNA, 15 bp, Homo sapiens
ttgccactaatctgg

SEQ ID NO: 2134097 - DNA, 15 bp, Homo sapiens
tgccactaatctggc

SEQ ID NO: 2134098 - DNA, 15 bp, Homo sapiens
gccactaatctggca

SEQ ID NO: 2134099 - DNA, 15 bp, Homo sapiens
ccactaatctggcaa

SEQ ID NO: 2134100 - DNA, 15 bp, Homo sapiens
cactaatctggcaac

SEQ ID NO: 2134101 - DNA, 15 bp, Homo sapiens
actaatctggcaacg

SEQ ID NO: 2134102 - DNA, 15 bp, Homo sapiens
ctaatctggcaacgt

SEQ ID NO: 2134103 - DNA, 15 bp, Homo sapiens
taatctggcaacgtg

SEQ ID NO: 2134104 - DNA, 15 bp, Homo sapiens
aatctggcaacgtgg

SEQ ID NO: 2134105 - DNA, 15 bp, Homo sapiens
atctggcaacgtggt

SEQ ID NO: 2134106 - DNA, 15 bp, Homo sapiens
tctggcaacgtggtc

SEQ ID NO: 2134107 - DNA, 15 bp, Homo sapiens
ctggcaacgtggtcc

SEQ ID NO: 2134108 - DNA, 15 bp, Homo sapiens
tggcaacgtggtcct

SEQ ID NO: 2134109 - DNA, 15 bp, Homo sapiens
ggcaacgtggtccta

SEQ ID NO: 2134110 - DNA, 15 bp, Homo sapiens
gcaacgtggtcctat

SEQ ID NO: 2134111 - DNA, 15 bp, Homo sapiens
caacgtggtcctata

SEQ ID NO: 2134112 - DNA, 15 bp, Homo sapiens
aacgtggtcctatat

SEQ ID NO: 2134113 - DNA, 15 bp, Homo sapiens
acgtggtcctatatt

SEQ ID NO: 2134114 - DNA, 15 bp, Homo sapiens
cgtggtcctatatta

SEQ ID NO: 2134115 - DNA, 15 bp, Homo sapiens
gtggtcctatattat

SEQ ID NO: 2134116 - DNA, 15 bp, Homo sapiens
tggtcctatattatg

SEQ ID NO: 2134117 - DNA, 15 bp, Homo sapiens
ggtcctatattatga

SEQ ID NO: 2134118 - DNA, 15 bp, Homo sapiens
gtcctatattatgaa

SEQ ID NO: 2134119 - DNA, 15 bp, Homo sapiens
tcctatattatgaag

SEQ ID NO: 2134120 - DNA, 15 bp, Homo sapiens
cctatattatgaagt

SEQ ID NO: 2134121 - DNA, 15 bp, Homo sapiens
ctatattatgaagta

SEQ ID NO: 2134122 - DNA, 15 bp, Homo sapiens
tatattatgaagtag

SEQ ID NO: 2134123 - DNA, 15 bp, Homo sapiens
atattatgaagtagt

SEQ ID NO: 2134124 - DNA, 15 bp, Homo sapiens
tattatgaagtagtc

SEQ ID NO: 2134125 - DNA, 15 bp, Homo sapiens
attatgaagtagtca

SEQ ID NO: 2134126 - DNA, 15 bp, Homo sapiens
ttatgaagtagtcat

SEQ ID NO: 2134127 - DNA, 15 bp, Homo sapiens
tatgaagtagtcata

SEQ ID NO: 2134128 - DNA, 15 bp, Homo sapiens
atgaagtagtcatat

SEQ ID NO: 2134129 - DNA, 15 bp, Homo sapiens
tgaagtagtcatata

SEQ ID NO: 2134130 - DNA, 15 bp, Homo sapiens
gaagtagtcatatag

SEQ ID NO: 2134131 - DNA, 15 bp, Homo sapiens
aagtagtcatatagc

SEQ ID NO: 2134132 - DNA, 15 bp, Homo sapiens
agtagtcatatagct

SEQ ID NO: 2134133 - DNA, 15 bp, Homo sapiens
gtagtcatatagctg

SEQ ID NO: 2134134 - DNA, 15 bp, Homo sapiens
tagtcatatagctga

SEQ ID NO: 2134135 - DNA, 15 bp, Homo sapiens
agtcatatagctgat

SEQ ID NO: 2134136 - DNA, 15 bp, Homo sapiens
gtcatatagctgatc

SEQ ID NO: 2134137 - DNA, 15 bp, Homo sapiens
tcatatagctgatct

SEQ ID NO: 2134138 - DNA, 15 bp, Homo sapiens
catatagctgatcta

SEQ ID NO: 2134139 - DNA, 15 bp, Homo sapiens
atatagctgatctaa

SEQ ID NO: 2134140 - DNA, 15 bp, Homo sapiens
tatagctgatctaaa

SEQ ID NO: 2134141 - DNA, 15 bp, Homo sapiens
atagctgatctaaac

SEQ ID NO: 2134142 - DNA, 15 bp, Homo sapiens
tagctgatctaaact

SEQ ID NO: 2134143 - DNA, 15 bp, Homo sapiens
agctgatctaaacta

SEQ ID NO: 2134144 - DNA, 15 bp, Homo sapiens
gctgatctaaactat

SEQ ID NO: 2134145 - DNA, 15 bp, Homo sapiens
ctgatctaaactatc

SEQ ID NO: 2134146 - DNA, 15 bp, Homo sapiens
tgatctaaactatcc

SEQ ID NO: 2134147 - DNA, 15 bp, Homo sapiens
gatctaaactatcct

SEQ ID NO: 2134148 - DNA, 15 bp, Homo sapiens
atctaaactatcctt

SEQ ID NO: 2134149 - DNA, 15 bp, Homo sapiens
tctaaactatcctta

SEQ ID NO: 2134150 - DNA, 15 bp, Homo sapiens
ctaaactatccttac

SEQ ID NO: 2134151 - DNA, 15 bp, Homo sapiens
taaactatccttaca

SEQ ID NO: 2134152 - DNA, 15 bp, Homo sapiens
aaactatccttacag

SEQ ID NO: 2134153 - DNA, 15 bp, Homo sapiens
aactatccttacagt

SEQ ID NO: 2134154 - DNA, 15 bp, Homo sapiens
actatccttacagtg

SEQ ID NO: 2134155 - DNA, 15 bp, Homo sapiens
ctatccttacagtga

SEQ ID NO: 2134156 - DNA, 15 bp, Homo sapiens
tatccttacagtgaa

SEQ ID NO: 2134157 - DNA, 15 bp, Homo sapiens
atccttacagtgaaa

SEQ ID NO: 2134158 - DNA, 15 bp, Homo sapiens
tccttacagtgaaat

SEQ ID NO: 2134159 - DNA, 15 bp, Homo sapiens
ccttacagtgaaatg

SEQ ID NO: 2134160 - DNA, 15 bp, Homo sapiens
cttacagtgaaatga

SEQ ID NO: 2134161 - DNA, 15 bp, Homo sapiens
ttacagtgaaatgag

SEQ ID NO: 2134162 - DNA, 15 bp, Homo sapiens
tacagtgaaatgaga

SEQ ID NO: 2134163 - DNA, 15 bp, Homo sapiens
acagtgaaatgagag

SEQ ID NO: 2134164 - DNA, 15 bp, Homo sapiens
cagtgaaatgagagt

SEQ ID NO: 2134165 - DNA, 15 bp, Homo sapiens
agtgaaatgagagta

SEQ ID NO: 2134166 - DNA, 15 bp, Homo sapiens
gtgaaatgagagtat

SEQ ID NO: 2134167 - DNA, 15 bp, Homo sapiens
tgaaatgagagtatt

SEQ ID NO: 2134168 - DNA, 15 bp, Homo sapiens
gaaatgagagtattg

SEQ ID NO: 2134169 - DNA, 15 bp, Homo sapiens
aaatgagagtattgt

SEQ ID NO: 2134170 - DNA, 15 bp, Homo sapiens
aatgagagtattgtg

SEQ ID NO: 2134171 - DNA, 15 bp, Homo sapiens
atgagagtattgtga

SEQ ID NO: 2134172 - DNA, 15 bp, Homo sapiens
tgagagtattgtgaa

SEQ ID NO: 2134173 - DNA, 15 bp, Homo sapiens
gagagtattgtgaaa

SEQ ID NO: 2134174 - DNA, 15 bp, Homo sapiens
agagtattgtgaaag

SEQ ID NO: 2134175 - DNA, 15 bp, Homo sapiens
gagtattgtgaaagt

SEQ ID NO: 2134176 - DNA, 15 bp, Homo sapiens
agtattgtgaaagtt

SEQ ID NO: 2134177 - DNA, 15 bp, Homo sapiens
gtattgtgaaagttt

SEQ ID NO: 2134178 - DNA, 15 bp, Homo sapiens
tattgtgaaagtttt

SEQ ID NO: 2134179 - DNA, 15 bp, Homo sapiens
attgtgaaagttttg

SEQ ID NO: 2134180 - DNA, 15 bp, Homo sapiens
ttgtgaaagttttgt

SEQ ID NO: 2134181 - DNA, 15 bp, Homo sapiens
tgtgaaagttttgta

SEQ ID NO: 2134182 - DNA, 15 bp, Homo sapiens
gtgaaagttttgtag

SEQ ID NO: 2134183 - DNA, 15 bp, Homo sapiens
tgaaagttttgtaga

SEQ ID NO: 2134184 - DNA, 15 bp, Homo sapiens
gaaagttttgtagaa

SEQ ID NO: 2134185 - DNA, 15 bp, Homo sapiens
aaagttttgtagaaa

SEQ ID NO: 2134186 - DNA, 15 bp, Homo sapiens
aagttttgtagaaag

SEQ ID NO: 2134187 - DNA, 15 bp, Homo sapiens
agttttgtagaaagc

SEQ ID NO: 2134188 - DNA, 15 bp, Homo sapiens
gttttgtagaaagct

SEQ ID NO: 2134189 - DNA, 15 bp, Homo sapiens
ttttgtagaaagctc

SEQ ID NO: 2134190 - DNA, 15 bp, Homo sapiens
tttgtagaaagctcc

SEQ ID NO: 2134191 - DNA, 15 bp, Homo sapiens
ttgtagaaagctccc

SEQ ID NO: 2134192 - DNA, 15 bp, Homo sapiens
tgtagaaagctcccc

SEQ ID NO: 2134193 - DNA, 15 bp, Homo sapiens
gtagaaagctcccca

SEQ ID NO: 2134194 - DNA, 15 bp, Homo sapiens
tagaaagctccccat

SEQ ID NO: 2134195 - DNA, 15 bp, Homo sapiens
agaaagctccccata

SEQ ID NO: 2134196 - DNA, 15 bp, Homo sapiens
gaaagctccccatat

SEQ ID NO: 2134197 - DNA, 15 bp, Homo sapiens
aaagctccccatatg

SEQ ID NO: 2134198 - DNA, 15 bp, Homo sapiens
aagctccccatatgt

SEQ ID NO: 2134199 - DNA, 15 bp, Homo sapiens
agctccccatatgtc

SEQ ID NO: 2134200 - DNA, 15 bp, Homo sapiens
gctccccatatgtcc

SEQ ID NO: 2134201 - DNA, 15 bp, Homo sapiens
ctccccatatgtcct

SEQ ID NO: 2134202 - DNA, 15 bp, Homo sapiens
tccccatatgtcctg

SEQ ID NO: 2134203 - DNA, 15 bp, Homo sapiens
ccccatatgtcctga

SEQ ID NO: 2134204 - DNA, 15 bp, Homo sapiens
cccatatgtcctgag

SEQ ID NO: 2134205 - DNA, 15 bp, Homo sapiens
ccatatgtcctgaga

SEQ ID NO: 2134206 - DNA, 15 bp, Homo sapiens
catatgtcctgagaa

SEQ ID NO: 2134207 - DNA, 15 bp, Homo sapiens
atatgtcctgagaat

SEQ ID NO: 2134208 - DNA, 15 bp, Homo sapiens
tatgtcctgagaatc

SEQ ID NO: 2134209 - DNA, 15 bp, Homo sapiens
atgtcctgagaatct

SEQ ID NO: 2134210 - DNA, 15 bp, Homo sapiens
tgtcctgagaatcta

SEQ ID NO: 2134211 - DNA, 15 bp, Homo sapiens
gtcctgagaatctat

SEQ ID NO: 2134212 - DNA, 15 bp, Homo sapiens
tcctgagaatctatg

SEQ ID NO: 2134213 - DNA, 15 bp, Homo sapiens
cctgagaatctatgc

SEQ ID NO: 2134214 - DNA, 15 bp, Homo sapiens
ctgagaatctatgca

SEQ ID NO: 2134215 - DNA, 15 bp, Homo sapiens
tgagaatctatgcac

SEQ ID NO: 2134216 - DNA, 15 bp, Homo sapiens
gagaatctatgcaca

SEQ ID NO: 2134217 - DNA, 15 bp, Homo sapiens
agaatctatgcacag

SEQ ID NO: 2134218 - DNA, 15 bp, Homo sapiens
gaatctatgcacaga

SEQ ID NO: 2134219 - DNA, 15 bp, Homo sapiens
aatctatgcacagac

SEQ ID NO: 2134220 - DNA, 15 bp, Homo sapiens
atctatgcacagacc

SEQ ID NO: 2134221 - DNA, 15 bp, Homo sapiens
tctatgcacagaccc

SEQ ID NO: 2134222 - DNA, 15 bp, Homo sapiens
ctatgcacagacccc

SEQ ID NO: 2134223 - DNA, 15 bp, Homo sapiens
tatgcacagacccca

SEQ ID NO: 2134224 - DNA, 15 bp, Homo sapiens
atgcacagaccccac

SEQ ID NO: 2134225 - DNA, 15 bp, Homo sapiens
tgcacagaccccaca

SEQ ID NO: 2134226 - DNA, 15 bp, Homo sapiens
gcacagaccccacag

SEQ ID NO: 2134227 - DNA, 15 bp, Homo sapiens
cacagaccccacagt

SEQ ID NO: 2134228 - DNA, 15 bp, Homo sapiens
acagaccccacagtt

SEQ ID NO: 2134229 - DNA, 15 bp, Homo sapiens
cagaccccacagtta

SEQ ID NO: 2134230 - DNA, 15 bp, Homo sapiens
agaccccacagttaa

SEQ ID NO: 2134231 - DNA, 15 bp, Homo sapiens
gaccccacagttaaa

SEQ ID NO: 2134232 - DNA, 15 bp, Homo sapiens
accccacagttaaaa

SEQ ID NO: 2134233 - DNA, 15 bp, Homo sapiens
ccccacagttaaaag

SEQ ID NO: 2134234 - DNA, 15 bp, Homo sapiens
cccacagttaaaaga

SEQ ID NO: 2134235 - DNA, 15 bp, Homo sapiens
ccacagttaaaagac

SEQ ID NO: 2134236 - DNA, 15 bp, Homo sapiens
cacagttaaaagacc

SEQ ID NO: 2134237 - DNA, 15 bp, Homo sapiens
acagttaaaagacct

SEQ ID NO: 2134238 - DNA, 15 bp, Homo sapiens
cagttaaaagacctt

SEQ ID NO: 2134239 - DNA, 15 bp, Homo sapiens
agttaaaagaccttt

SEQ ID NO: 2134240 - DNA, 15 bp, Homo sapiens
gttaaaagacctttg

SEQ ID NO: 2134241 - DNA, 15 bp, Homo sapiens
ttaaaagacctttga

SEQ ID NO: 2134242 - DNA, 15 bp, Homo sapiens
taaaagacctttgaa

SEQ ID NO: 2134243 - DNA, 15 bp, Homo sapiens
aaaagacctttgaat

SEQ ID NO: 2134244 - DNA, 15 bp, Homo sapiens
aaagacctttgaatt

SEQ ID NO: 2134245 - DNA, 15 bp, Homo sapiens
aagacctttgaattg

SEQ ID NO: 2134246 - DNA, 15 bp, Homo sapiens
agacctttgaattgt

SEQ ID NO: 2134247 - DNA, 15 bp, Homo sapiens
gacctttgaattgtg

SEQ ID NO: 2134248 - DNA, 15 bp, Homo sapiens
acctttgaattgtgg

SEQ ID NO: 2134249 - DNA, 15 bp, Homo sapiens
cctttgaattgtggg

SEQ ID NO: 2134250 - DNA, 15 bp, Homo sapiens
ctttgaattgtggga

SEQ ID NO: 2134251 - DNA, 15 bp, Homo sapiens
tttgaattgtgggaa

SEQ ID NO: 2134252 - DNA, 15 bp, Homo sapiens
ttgaattgtgggaag

SEQ ID NO: 2134253 - DNA, 15 bp, Homo sapiens
tgaattgtgggaaga

SEQ ID NO: 2134254 - DNA, 15 bp, Homo sapiens
gaattgtgggaagac

SEQ ID NO: 2134255 - DNA, 15 bp, Homo sapiens
aattgtgggaagaca

SEQ ID NO: 2134256 - DNA, 15 bp, Homo sapiens
attgtgggaagacat

SEQ ID NO: 2134257 - DNA, 15 bp, Homo sapiens
ttgtgggaagacatg

SEQ ID NO: 2134258 - DNA, 15 bp, Homo sapiens
tgtgggaagacatgg

SEQ ID NO: 2134259 - DNA, 15 bp, Homo sapiens
gtgggaagacatggg

SEQ ID NO: 2134260 - DNA, 15 bp, Homo sapiens
tgggaagacatgggt

SEQ ID NO: 2134261 - DNA, 15 bp, Homo sapiens
gggaagacatgggtt

SEQ ID NO: 2134262 - DNA, 15 bp, Homo sapiens
ggaagacatgggttt

SEQ ID NO: 2134263 - DNA, 15 bp, Homo sapiens
gaagacatgggttta

SEQ ID NO: 2134264 - DNA, 15 bp, Homo sapiens
aagacatgggtttaa

SEQ ID NO: 2134265 - DNA, 15 bp, Homo sapiens
agacatgggtttaag

SEQ ID NO: 2134266 - DNA, 15 bp, Homo sapiens
gacatgggtttaagt

SEQ ID NO: 2134267 - DNA, 15 bp, Homo sapiens
acatgggtttaagta

SEQ ID NO: 2134268 - DNA, 15 bp, Homo sapiens
catgggtttaagtat

SEQ ID NO: 2134269 - DNA, 15 bp, Homo sapiens
atgggtttaagtatc

SEQ ID NO: 2134270 - DNA, 15 bp, Homo sapiens
tgggtttaagtatca

SEQ ID NO: 2134271 - DNA, 15 bp, Homo sapiens
gggtttaagtatcac

SEQ ID NO: 2134272 - DNA, 15 bp, Homo sapiens
ggtttaagtatcact

SEQ ID NO: 2134273 - DNA, 15 bp, Homo sapiens
gtttaagtatcactt

SEQ ID NO: 2134274 - DNA, 15 bp, Homo sapiens
tttaagtatcacttg

SEQ ID NO: 2134275 - DNA, 15 bp, Homo sapiens
ttaagtatcacttgg

SEQ ID NO: 2134276 - DNA, 15 bp, Homo sapiens
taagtatcacttggt

SEQ ID NO: 2134277 - DNA, 15 bp, Homo sapiens
aagtatcacttggtt

SEQ ID NO: 2134278 - DNA, 15 bp, Homo sapiens
agtatcacttggtta

SEQ ID NO: 2134279 - DNA, 15 bp, Homo sapiens
gtatcacttggttac

SEQ ID NO: 2134280 - DNA, 15 bp, Homo sapiens
tatcacttggttacc

SEQ ID NO: 2134281 - DNA, 15 bp, Homo sapiens
atcacttggttacct

SEQ ID NO: 2134282 - DNA, 15 bp, Homo sapiens
tcacttggttacctt

SEQ ID NO: 2134283 - DNA, 15 bp, Homo sapiens
cacttggttaccttc

SEQ ID NO: 2134284 - DNA, 15 bp, Homo sapiens
acttggttaccttct

SEQ ID NO: 2134285 - DNA, 15 bp, Homo sapiens
cttggttaccttcta

SEQ ID NO: 2134286 - DNA, 15 bp, Homo sapiens
ttggttaccttctat

SEQ ID NO: 2134287 - DNA, 15 bp, Homo sapiens
tggttaccttctatt

SEQ ID NO: 2134288 - DNA, 15 bp, Homo sapiens
ggttaccttctattt

SEQ ID NO: 2134289 - DNA, 15 bp, Homo sapiens
gttaccttctatttg

SEQ ID NO: 2134290 - DNA, 15 bp, Homo sapiens
ttaccttctatttgt

SEQ ID NO: 2134291 - DNA, 15 bp, Homo sapiens
taccttctatttgtg

SEQ ID NO: 2134292 - DNA, 15 bp, Homo sapiens
accttctatttgtgt

SEQ ID NO: 2134293 - DNA, 15 bp, Homo sapiens
ccttctatttgtgta

SEQ ID NO: 2134294 - DNA, 15 bp, Homo sapiens
cttctatttgtgtaa

SEQ ID NO: 2134295 - DNA, 15 bp, Homo sapiens
ttctatttgtgtaac

SEQ ID NO: 2134296 - DNA, 15 bp, Homo sapiens
tctatttgtgtaaca

SEQ ID NO: 2134297 - DNA, 15 bp, Homo sapiens
ctatttgtgtaacat

SEQ ID NO: 2134298 - DNA, 15 bp, Homo sapiens
tatttgtgtaacatt

SEQ ID NO: 2134299 - DNA, 15 bp, Homo sapiens
ttgtgtaacattgag

SEQ ID NO: 2134300 - DNA, 15 bp, Homo sapiens
tgtgtaacattgagg

SEQ ID NO: 2134301 - DNA, 15 bp, Homo sapiens
gtgtaacattgaggt

SEQ ID NO: 2134302 - DNA, 15 bp, Homo sapiens
tgtaacattgaggta

SEQ ID NO: 2134303 - DNA, 15 bp, Homo sapiens
gtaacattgaggtag

SEQ ID NO: 2134304 - DNA, 15 bp, Homo sapiens
taacattgaggtagt

SEQ ID NO: 2134305 - DNA, 15 bp, Homo sapiens
aacattgaggtagtt

SEQ ID NO: 2134306 - DNA, 15 bp, Homo sapiens
acattgaggtagttt

SEQ ID NO: 2134307 - DNA, 15 bp, Homo sapiens
cattgaggtagtttc

SEQ ID NO: 2134308 - DNA, 15 bp, Homo sapiens
attgaggtagtttca

SEQ ID NO: 2134309 - DNA, 15 bp, Homo sapiens
ttgaggtagtttcat

SEQ ID NO: 2134310 - DNA, 15 bp, Homo sapiens
tgaggtagtttcatc

SEQ ID NO: 2134311 - DNA, 15 bp, Homo sapiens
gaggtagtttcatct

SEQ ID NO: 2134312 - DNA, 15 bp, Homo sapiens
aggtagtttcatctt

SEQ ID NO: 2134313 - DNA, 15 bp, Homo sapiens
ggtagtttcatcttc

SEQ ID NO: 2134314 - DNA, 15 bp, Homo sapiens
gtagtttcatcttct

SEQ ID NO: 2134315 - DNA, 15 bp, Homo sapiens
tagtttcatcttctg

SEQ ID NO: 2134316 - DNA, 15 bp, Homo sapiens
agtttcatcttctgg

SEQ ID NO: 2134317 - DNA, 15 bp, Homo sapiens
gtttcatcttctggg

SEQ ID NO: 2134318 - DNA, 15 bp, Homo sapiens
tttcatcttctgggt

SEQ ID NO: 2134319 - DNA, 15 bp, Homo sapiens
ttcatcttctgggtt

SEQ ID NO: 2134320 - DNA, 15 bp, Homo sapiens
tcatcttctgggttc

SEQ ID NO: 2134321 - DNA, 15 bp, Homo sapiens
catcttctgggttcc

SEQ ID NO: 2134322 - DNA, 15 bp, Homo sapiens
atcttctgggttccc

SEQ ID NO: 2134323 - DNA, 15 bp, Homo sapiens
tcttctgggttccca

SEQ ID NO: 2134324 - DNA, 15 bp, Homo sapiens
cttctgggttcccag

SEQ ID NO: 2134325 - DNA, 15 bp, Homo sapiens
ttctgggttcccagt

SEQ ID NO: 2134326 - DNA, 15 bp, Homo sapiens
tctgggttcccagtt

SEQ ID NO: 2134327 - DNA, 15 bp, Homo sapiens
ctgggttcccagttt

SEQ ID NO: 2134328 - DNA, 15 bp, Homo sapiens
tgggttcccagtttc

SEQ ID NO: 2134329 - DNA, 15 bp, Homo sapiens
gggttcccagtttcc

SEQ ID NO: 2134330 - DNA, 15 bp, Homo sapiens
ggttcccagtttcct

SEQ ID NO: 2134331 - DNA, 15 bp, Homo sapiens
gttcccagtttcctt

SEQ ID NO: 2134332 - DNA, 15 bp, Homo sapiens
ttcccagtttcctta

SEQ ID NO: 2134333 - DNA, 15 bp, Homo sapiens
tcccagtttccttag

SEQ ID NO: 2134334 - DNA, 15 bp, Homo sapiens
cccagtttccttaga

SEQ ID NO: 2134335 - DNA, 15 bp, Homo sapiens
ccagtttccttagag

SEQ ID NO: 2134336 - DNA, 15 bp, Homo sapiens
cagtttccttagaga

SEQ ID NO: 2134337 - DNA, 15 bp, Homo sapiens
agtttccttagagaa

SEQ ID NO: 2134338 - DNA, 15 bp, Homo sapiens
gtttccttagagaat

SEQ ID NO: 2134339 - DNA, 15 bp, Homo sapiens
tttccttagagaatg

SEQ ID NO: 2134340 - DNA, 15 bp, Homo sapiens
ttccttagagaatga

SEQ ID NO: 2134341 - DNA, 15 bp, Homo sapiens
tccttagagaatgaa

SEQ ID NO: 2134342 - DNA, 15 bp, Homo sapiens
ccttagagaatgaaa

SEQ ID NO: 2134343 - DNA, 15 bp, Homo sapiens
cttagagaatgaaaa

SEQ ID NO: 2134344 - DNA, 15 bp, Homo sapiens
ttagagaatgaaaat

SEQ ID NO: 2134345 - DNA, 15 bp, Homo sapiens
tagagaatgaaaatg

SEQ ID NO: 2134346 - DNA, 15 bp, Homo sapiens
agagaatgaaaatgt

SEQ ID NO: 2134347 - DNA, 15 bp, Homo sapiens
gagaatgaaaatgtt

SEQ ID NO: 2134348 - DNA, 15 bp, Homo sapiens
agaatgaaaatgttg

SEQ ID NO: 2134349 - DNA, 15 bp, Homo sapiens
gaatgaaaatgttga

SEQ ID NO: 2134350 - DNA, 15 bp, Homo sapiens
aatgaaaatgttgaa

SEQ ID NO: 2134351 - DNA, 15 bp, Homo sapiens
atgaaaatgttgaat

SEQ ID NO: 2134352 - DNA, 15 bp, Homo sapiens
tgaaaatgttgaatt

SEQ ID NO: 2134353 - DNA, 15 bp, Homo sapiens
gaaaatgttgaatta

SEQ ID NO: 2134354 - DNA, 15 bp, Homo sapiens
aaaatgttgaattat

SEQ ID NO: 2134355 - DNA, 15 bp, Homo sapiens
aaatgttgaattatg

SEQ ID NO: 2134356 - DNA, 15 bp, Homo sapiens
aatgttgaattatgt

SEQ ID NO: 2134357 - DNA, 15 bp, Homo sapiens
atgttgaattatgtg

SEQ ID NO: 2134358 - DNA, 15 bp, Homo sapiens
tgttgaattatgtga

SEQ ID NO: 2134359 - DNA, 15 bp, Homo sapiens
gttgaattatgtgat

SEQ ID NO: 2134360 - DNA, 15 bp, Homo sapiens
ttgaattatgtgatt

SEQ ID NO: 2134361 - DNA, 15 bp, Homo sapiens
tgaattatgtgattt

SEQ ID NO: 2134362 - DNA, 15 bp, Homo sapiens
gaattatgtgatttt

SEQ ID NO: 2134363 - DNA, 15 bp, Homo sapiens
aattatgtgattttt

SEQ ID NO: 2134364 - DNA, 15 bp, Homo sapiens
attatgtgatttttt

SEQ ID NO: 2134365 - DNA, 15 bp, Homo sapiens
ttatgtgattttttt

SEQ ID NO: 2134366 - DNA, 15 bp, Homo sapiens
tatgtgatttttttt

SEQ ID NO: 2134367 - DNA, 15 bp, Homo sapiens
ttgagacggagtttt

SEQ ID NO: 2134368 - DNA, 15 bp, Homo sapiens
tgagacggagttttg

SEQ ID NO: 2134369 - DNA, 15 bp, Homo sapiens
gagacggagttttgc

SEQ ID NO: 2134370 - DNA, 15 bp, Homo sapiens
agacggagttttgct

SEQ ID NO: 2134371 - DNA, 15 bp, Homo sapiens
gacggagttttgctc

SEQ ID NO: 2134372 - DNA, 15 bp, Homo sapiens
acggagttttgctct

SEQ ID NO: 2134373 - DNA, 15 bp, Homo sapiens
cggagttttgctctt

SEQ ID NO: 2134374 - DNA, 15 bp, Homo sapiens
ggagttttgctcttt

SEQ ID NO: 2134375 - DNA, 15 bp, Homo sapiens
gagttttgctctttc

SEQ ID NO: 2134376 - DNA, 15 bp, Homo sapiens
agttttgctctttcg

SEQ ID NO: 2134377 - DNA, 15 bp, Homo sapiens
gttttgctctttcgc

SEQ ID NO: 2134378 - DNA, 15 bp, Homo sapiens
ttttgctctttcgcc

SEQ ID NO: 2134379 - DNA, 15 bp, Homo sapiens
tttgctctttcgccc

SEQ ID NO: 2134380 - DNA, 15 bp, Homo sapiens
ttgctctttcgccca

SEQ ID NO: 2134381 - DNA, 15 bp, Homo sapiens
tgctctttcgcccag

SEQ ID NO: 2134382 - DNA, 15 bp, Homo sapiens
gctctttcgcccagg

SEQ ID NO: 2134383 - DNA, 15 bp, Homo sapiens
ctctttcgcccaggc

SEQ ID NO: 2134384 - DNA, 15 bp, Homo sapiens
tctttcgcccaggct

SEQ ID NO: 2134385 - DNA, 15 bp, Homo sapiens
ctttcgcccaggctg

SEQ ID NO: 2134386 - DNA, 15 bp, Homo sapiens
tttcgcccaggctgg

SEQ ID NO: 2134387 - DNA, 15 bp, Homo sapiens
ttcgcccaggctgga

SEQ ID NO: 2134388 - DNA, 15 bp, Homo sapiens
cccaggctggagtga

SEQ ID NO: 2134389 - DNA, 15 bp, Homo sapiens
ccaggctggagtgaa

SEQ ID NO: 2134390 - DNA, 15 bp, Homo sapiens
caggctggagtgaag

SEQ ID NO: 2134391 - DNA, 15 bp, Homo sapiens
aggctggagtgaagt

SEQ ID NO: 2134392 - DNA, 15 bp, Homo sapiens
ggctggagtgaagta

SEQ ID NO: 2134393 - DNA, 15 bp, Homo sapiens
gctggagtgaagtag

SEQ ID NO: 2134394 - DNA, 15 bp, Homo sapiens
ctggagtgaagtagc

SEQ ID NO: 2134395 - DNA, 15 bp, Homo sapiens
tggagtgaagtagca

SEQ ID NO: 2134396 - DNA, 15 bp, Homo sapiens
ggagtgaagtagcac

SEQ ID NO: 2134397 - DNA, 15 bp, Homo sapiens
gagtgaagtagcacg

SEQ ID NO: 2134398 - DNA, 15 bp, Homo sapiens
agtgaagtagcacga

SEQ ID NO: 2134399 - DNA, 15 bp, Homo sapiens
gtgaagtagcacgat

SEQ ID NO: 2134400 - DNA, 15 bp, Homo sapiens
tgaagtagcacgatc

SEQ ID NO: 2134401 - DNA, 15 bp, Homo sapiens
gaagtagcacgatct

SEQ ID NO: 2134402 - DNA, 15 bp, Homo sapiens
aagtagcacgatctc

SEQ ID NO: 2134403 - DNA, 15 bp, Homo sapiens
agtagcacgatctcg

SEQ ID NO: 2134404 - DNA, 15 bp, Homo sapiens
gtagcacgatctcga

SEQ ID NO: 2134405 - DNA, 15 bp, Homo sapiens
tagcacgatctcgac

SEQ ID NO: 2134406 - DNA, 15 bp, Homo sapiens
agcacgatctcgact

SEQ ID NO: 2134407 - DNA, 15 bp, Homo sapiens
tcactgcaacctcct

SEQ ID NO: 2134408 - DNA, 15 bp, Homo sapiens
cactgcaacctcctt

SEQ ID NO: 2134409 - DNA, 15 bp, Homo sapiens
actgcaacctccttc

SEQ ID NO: 2134410 - DNA, 15 bp, Homo sapiens
ctgcaacctccttcc

SEQ ID NO: 2134411 - DNA, 15 bp, Homo sapiens
tgcaacctccttccc

SEQ ID NO: 2134412 - DNA, 15 bp, Homo sapiens
gcaacctccttcccc

SEQ ID NO: 2134413 - DNA, 15 bp, Homo sapiens
caacctccttccccc

SEQ ID NO: 2134414 - DNA, 15 bp, Homo sapiens
aacctccttccccca

SEQ ID NO: 2134415 - DNA, 15 bp, Homo sapiens
acctccttcccccat

SEQ ID NO: 2134416 - DNA, 15 bp, Homo sapiens
cctccttcccccatg

SEQ ID NO: 2134417 - DNA, 15 bp, Homo sapiens
ctccttcccccatga

SEQ ID NO: 2134418 - DNA, 15 bp, Homo sapiens
tccttcccccatgat

SEQ ID NO: 2134419 - DNA, 15 bp, Homo sapiens
ccttcccccatgatc

SEQ ID NO: 2134420 - DNA, 15 bp, Homo sapiens
cttcccccatgatca

SEQ ID NO: 2134421 - DNA, 15 bp, Homo sapiens
ttcccccatgatcaa

SEQ ID NO: 2134422 - DNA, 15 bp, Homo sapiens
cccccatgatcaagc

SEQ ID NO: 2134423 - DNA, 15 bp, Homo sapiens
ccccatgatcaagca

SEQ ID NO: 2134424 - DNA, 15 bp, Homo sapiens
cccatgatcaagcaa

SEQ ID NO: 2134425 - DNA, 15 bp, Homo sapiens
ccatgatcaagcaat

SEQ ID NO: 2134426 - DNA, 15 bp, Homo sapiens
catgatcaagcaatt

SEQ ID NO: 2134427 - DNA, 15 bp, Homo sapiens
atgatcaagcaattc

SEQ ID NO: 2134428 - DNA, 15 bp, Homo sapiens
tgatcaagcaattct

SEQ ID NO: 2134429 - DNA, 15 bp, Homo sapiens
gatcaagcaattctc

SEQ ID NO: 2134430 - DNA, 15 bp, Homo sapiens
atcaagcaattctcc

SEQ ID NO: 2134431 - DNA, 15 bp, Homo sapiens
gattacaggcacccg

SEQ ID NO: 2134432 - DNA, 15 bp, Homo sapiens
tacaggcacccgccc

SEQ ID NO: 2134433 - DNA, 15 bp, Homo sapiens
acaggcacccgcccc

SEQ ID NO: 2134434 - DNA, 15 bp, Homo sapiens
caggcacccgccccc

SEQ ID NO: 2134435 - DNA, 15 bp, Homo sapiens
aggcacccgcccccc

SEQ ID NO: 2134436 - DNA, 15 bp, Homo sapiens
ggcacccgcccccca

SEQ ID NO: 2134437 - DNA, 15 bp, Homo sapiens
gcacccgccccccac

SEQ ID NO: 2134438 - DNA, 15 bp, Homo sapiens
cacccgccccccacc

SEQ ID NO: 2134439 - DNA, 15 bp, Homo sapiens
acccgccccccaccc

SEQ ID NO: 2134440 - DNA, 15 bp, Homo sapiens
cccgccccccacccc

SEQ ID NO: 2134441 - DNA, 15 bp, Homo sapiens
ccgccccccaccccc

SEQ ID NO: 2134442 - DNA, 15 bp, Homo sapiens
cgccccccacccccc

SEQ ID NO: 2134443 - DNA, 15 bp, Homo sapiens
gccccccaccccccg

SEQ ID NO: 2134444 - DNA, 15 bp, Homo sapiens
ccccccaccccccgc

SEQ ID NO: 2134445 - DNA, 15 bp, Homo sapiens
cccccaccccccgcc

SEQ ID NO: 2134446 - DNA, 15 bp, Homo sapiens
ccccaccccccgccc

SEQ ID NO: 2134447 - DNA, 15 bp, Homo sapiens
cccaccccccgcccc

SEQ ID NO: 2134448 - DNA, 15 bp, Homo sapiens
ccaccccccgccccc

SEQ ID NO: 2134449 - DNA, 15 bp, Homo sapiens
caccccccgccccca

SEQ ID NO: 2134450 - DNA, 15 bp, Homo sapiens
accccccgcccccag

SEQ ID NO: 2134451 - DNA, 15 bp, Homo sapiens
ccccccgcccccagc

SEQ ID NO: 2134452 - DNA, 15 bp, Homo sapiens
ccccgcccccagcta

SEQ ID NO: 2134453 - DNA, 15 bp, Homo sapiens
cccgcccccagctaa

SEQ ID NO: 2134454 - DNA, 15 bp, Homo sapiens
ccgcccccagctaat

SEQ ID NO: 2134455 - DNA, 15 bp, Homo sapiens
cgcccccagctaatg

SEQ ID NO: 2134456 - DNA, 15 bp, Homo sapiens
gcccccagctaatgt

SEQ ID NO: 2134457 - DNA, 15 bp, Homo sapiens
cccccagctaatgtt

SEQ ID NO: 2134458 - DNA, 15 bp, Homo sapiens
ccccagctaatgttt

SEQ ID NO: 2134459 - DNA, 15 bp, Homo sapiens
cccagctaatgtttg

SEQ ID NO: 2134460 - DNA, 15 bp, Homo sapiens
ccagctaatgtttgt

SEQ ID NO: 2134461 - DNA, 15 bp, Homo sapiens
cagctaatgtttgta

SEQ ID NO: 2134462 - DNA, 15 bp, Homo sapiens
agctaatgtttgtat

SEQ ID NO: 2134463 - DNA, 15 bp, Homo sapiens
gctaatgtttgtatt

SEQ ID NO: 2134464 - DNA, 15 bp, Homo sapiens
ctaatgtttgtattt

SEQ ID NO: 2134465 - DNA, 15 bp, Homo sapiens
taatgtttgtatttt

SEQ ID NO: 2134466 - DNA, 15 bp, Homo sapiens
aatgtttgtattttt

SEQ ID NO: 2134467 - DNA, 15 bp, Homo sapiens
atgtttgtattttta

SEQ ID NO: 2134468 - DNA, 15 bp, Homo sapiens
tgtttgtatttttag

SEQ ID NO: 2134469 - DNA, 15 bp, Homo sapiens
gtttgtatttttagt

SEQ ID NO: 2134470 - DNA, 15 bp, Homo sapiens
atttttagtacagat

SEQ ID NO: 2134471 - DNA, 15 bp, Homo sapiens
tttttagtacagatg

SEQ ID NO: 2134472 - DNA, 15 bp, Homo sapiens
ttttagtacagatgg

SEQ ID NO: 2134473 - DNA, 15 bp, Homo sapiens
tttagtacagatgga

SEQ ID NO: 2134474 - DNA, 15 bp, Homo sapiens
ttagtacagatggag

SEQ ID NO: 2134475 - DNA, 15 bp, Homo sapiens
tagtacagatggagt

SEQ ID NO: 2134476 - DNA, 15 bp, Homo sapiens
agtacagatggagtt

SEQ ID NO: 2134477 - DNA, 15 bp, Homo sapiens
gtacagatggagttt

SEQ ID NO: 2134478 - DNA, 15 bp, Homo sapiens
tacagatggagtttt

SEQ ID NO: 2134479 - DNA, 15 bp, Homo sapiens
acagatggagttttg

SEQ ID NO: 2134480 - DNA, 15 bp, Homo sapiens
cagatggagttttgc

SEQ ID NO: 2134481 - DNA, 15 bp, Homo sapiens
gatggagttttgccg

SEQ ID NO: 2134482 - DNA, 15 bp, Homo sapiens
atggagttttgccgt

SEQ ID NO: 2134483 - DNA, 15 bp, Homo sapiens
tggagttttgccgtg

SEQ ID NO: 2134484 - DNA, 15 bp, Homo sapiens
ggagttttgccgtgt

SEQ ID NO: 2134485 - DNA, 15 bp, Homo sapiens
gagttttgccgtgtt

SEQ ID NO: 2134486 - DNA, 15 bp, Homo sapiens
agttttgccgtgttg

SEQ ID NO: 2134487 - DNA, 15 bp, Homo sapiens
gttttgccgtgttgg

SEQ ID NO: 2134488 - DNA, 15 bp, Homo sapiens
ttttgccgtgttggc

SEQ ID NO: 2134489 - DNA, 15 bp, Homo sapiens
tttgccgtgttggcc

SEQ ID NO: 2134490 - DNA, 15 bp, Homo sapiens
ttgccgtgttggcca

SEQ ID NO: 2134491 - DNA, 15 bp, Homo sapiens
tgccgtgttggccag

SEQ ID NO: 2134492 - DNA, 15 bp, Homo sapiens
gccgtgttggccagg

SEQ ID NO: 2134493 - DNA, 15 bp, Homo sapiens
ccgtgttggccaggc

SEQ ID NO: 2134494 - DNA, 15 bp, Homo sapiens
cgtgttggccaggct

SEQ ID NO: 2134495 - DNA, 15 bp, Homo sapiens
gtgttggccaggctg

SEQ ID NO: 2134496 - DNA, 15 bp, Homo sapiens
gctggtctcgaactt

SEQ ID NO: 2134497 - DNA, 15 bp, Homo sapiens
ctggtctcgaacttc

SEQ ID NO: 2134498 - DNA, 15 bp, Homo sapiens
tggtctcgaacttct

SEQ ID NO: 2134499 - DNA, 15 bp, Homo sapiens
ggtctcgaacttctg

SEQ ID NO: 2134500 - DNA, 15 bp, Homo sapiens
gtctcgaacttctga

SEQ ID NO: 2134501 - DNA, 15 bp, Homo sapiens
tctcgaacttctgac

SEQ ID NO: 2134502 - DNA, 15 bp, Homo sapiens
ctcgaacttctgacc

SEQ ID NO: 2134503 - DNA, 15 bp, Homo sapiens
tcgaacttctgacct

SEQ ID NO: 2134504 - DNA, 15 bp, Homo sapiens
cgaacttctgacctc

SEQ ID NO: 2134505 - DNA, 15 bp, Homo sapiens
aacttctgacctcag

SEQ ID NO: 2134506 - DNA, 15 bp, Homo sapiens
acttctgacctcagg

SEQ ID NO: 2134507 - DNA, 15 bp, Homo sapiens
cttctgacctcaggt

SEQ ID NO: 2134508 - DNA, 15 bp, Homo sapiens
ttctgacctcaggtg

SEQ ID NO: 2134509 - DNA, 15 bp, Homo sapiens
tcaggtgatccactc

SEQ ID NO: 2134510 - DNA, 15 bp, Homo sapiens
caggtgatccactcg

SEQ ID NO: 2134511 - DNA, 15 bp, Homo sapiens
aggtgatccactcgc

SEQ ID NO: 2134512 - DNA, 15 bp, Homo sapiens
ggtgatccactcgcc

SEQ ID NO: 2134513 - DNA, 15 bp, Homo sapiens
tgatccactcgcctt

SEQ ID NO: 2134514 - DNA, 15 bp, Homo sapiens
gatccactcgccttg

SEQ ID NO: 2134515 - DNA, 15 bp, Homo sapiens
atccactcgccttgg

SEQ ID NO: 2134516 - DNA, 15 bp, Homo sapiens
tccactcgccttggc

SEQ ID NO: 2134517 - DNA, 15 bp, Homo sapiens
ccactcgccttggcc

SEQ ID NO: 2134518 - DNA, 15 bp, Homo sapiens
cactcgccttggcct

SEQ ID NO: 2134519 - DNA, 15 bp, Homo sapiens
actcgccttggcctc

SEQ ID NO: 2134520 - DNA, 15 bp, Homo sapiens
ctcgccttggcctcc

SEQ ID NO: 2134521 - DNA, 15 bp, Homo sapiens
tcgccttggcctccc

SEQ ID NO: 2134522 - DNA, 15 bp, Homo sapiens
cactgcgcctggcct

SEQ ID NO: 2134523 - DNA, 15 bp, Homo sapiens
actgcgcctggccta

SEQ ID NO: 2134524 - DNA, 15 bp, Homo sapiens
ctgcgcctggcctat

SEQ ID NO: 2134525 - DNA, 15 bp, Homo sapiens
tgcgcctggcctatg

SEQ ID NO: 2134526 - DNA, 15 bp, Homo sapiens
gcgcctggcctatgt

SEQ ID NO: 2134527 - DNA, 15 bp, Homo sapiens
cgcctggcctatgtg

SEQ ID NO: 2134528 - DNA, 15 bp, Homo sapiens
gcctggcctatgtga

SEQ ID NO: 2134529 - DNA, 15 bp, Homo sapiens
cctggcctatgtgat

SEQ ID NO: 2134530 - DNA, 15 bp, Homo sapiens
ctggcctatgtgatt

SEQ ID NO: 2134531 - DNA, 15 bp, Homo sapiens
tggcctatgtgatta

SEQ ID NO: 2134532 - DNA, 15 bp, Homo sapiens
ggcctatgtgattat

SEQ ID NO: 2134533 - DNA, 15 bp, Homo sapiens
gcctatgtgattatt

SEQ ID NO: 2134534 - DNA, 15 bp, Homo sapiens
cctatgtgattatta

SEQ ID NO: 2134535 - DNA, 15 bp, Homo sapiens
ctatgtgattattaa

SEQ ID NO: 2134536 - DNA, 15 bp, Homo sapiens
tatgtgattattaat

SEQ ID NO: 2134537 - DNA, 15 bp, Homo sapiens
atgtgattattaata

SEQ ID NO: 2134538 - DNA, 15 bp, Homo sapiens
tgtgattattaatat

SEQ ID NO: 2134539 - DNA, 15 bp, Homo sapiens
gtgattattaatatc

SEQ ID NO: 2134540 - DNA, 15 bp, Homo sapiens
tgattattaatatca

SEQ ID NO: 2134541 - DNA, 15 bp, Homo sapiens
gattattaatatcac

SEQ ID NO: 2134542 - DNA, 15 bp, Homo sapiens
attattaatatcacg

SEQ ID NO: 2134543 - DNA, 15 bp, Homo sapiens
ttattaatatcacgt

SEQ ID NO: 2134544 - DNA, 15 bp, Homo sapiens
tattaatatcacgtc

SEQ ID NO: 2134545 - DNA, 15 bp, Homo sapiens
attaatatcacgtct

SEQ ID NO: 2134546 - DNA, 15 bp, Homo sapiens
ttaatatcacgtcta

SEQ ID NO: 2134547 - DNA, 15 bp, Homo sapiens
taatatcacgtctag

SEQ ID NO: 2134548 - DNA, 15 bp, Homo sapiens
aatatcacgtctagc

SEQ ID NO: 2134549 - DNA, 15 bp, Homo sapiens
atatcacgtctagct

SEQ ID NO: 2134550 - DNA, 15 bp, Homo sapiens
tatcacgtctagctg

SEQ ID NO: 2134551 - DNA, 15 bp, Homo sapiens
atcacgtctagctgt

SEQ ID NO: 2134552 - DNA, 15 bp, Homo sapiens
tcacgtctagctgtg

SEQ ID NO: 2134553 - DNA, 15 bp, Homo sapiens
cacgtctagctgtga

SEQ ID NO: 2134554 - DNA, 15 bp, Homo sapiens
acgtctagctgtgac

SEQ ID NO: 2134555 - DNA, 15 bp, Homo sapiens
cgtctagctgtgaca

SEQ ID NO: 2134556 - DNA, 15 bp, Homo sapiens
gtctagctgtgacaa

SEQ ID NO: 2134557 - DNA, 15 bp, Homo sapiens
tctagctgtgacaat

SEQ ID NO: 2134558 - DNA, 15 bp, Homo sapiens
ctagctgtgacaatt

SEQ ID NO: 2134559 - DNA, 15 bp, Homo sapiens
tagctgtgacaattc

SEQ ID NO: 2134560 - DNA, 15 bp, Homo sapiens
agctgtgacaattct

SEQ ID NO: 2134561 - DNA, 15 bp, Homo sapiens
gctgtgacaattctg

SEQ ID NO: 2134562 - DNA, 15 bp, Homo sapiens
ctgtgacaattctgt

SEQ ID NO: 2134563 - DNA, 15 bp, Homo sapiens
tgtgacaattctgtc

SEQ ID NO: 2134564 - DNA, 15 bp, Homo sapiens
gtgacaattctgtct

SEQ ID NO: 2134565 - DNA, 15 bp, Homo sapiens
tgacaattctgtctg

SEQ ID NO: 2134566 - DNA, 15 bp, Homo sapiens
gacaattctgtctga

SEQ ID NO: 2134567 - DNA, 15 bp, Homo sapiens
acaattctgtctgat

SEQ ID NO: 2134568 - DNA, 15 bp, Homo sapiens
caattctgtctgatg

SEQ ID NO: 2134569 - DNA, 15 bp, Homo sapiens
aattctgtctgatgc

SEQ ID NO: 2134570 - DNA, 15 bp, Homo sapiens
attctgtctgatgct

SEQ ID NO: 2134571 - DNA, 15 bp, Homo sapiens
ttctgtctgatgctg

SEQ ID NO: 2134572 - DNA, 15 bp, Homo sapiens
tctgtctgatgctgg

SEQ ID NO: 2134573 - DNA, 15 bp, Homo sapiens
ctgtctgatgctgga

SEQ ID NO: 2134574 - DNA, 15 bp, Homo sapiens
tgtctgatgctggag

SEQ ID NO: 2134575 - DNA, 15 bp, Homo sapiens
gtctgatgctggagt

SEQ ID NO: 2134576 - DNA, 15 bp, Homo sapiens
tctgatgctggagta

SEQ ID NO: 2134577 - DNA, 15 bp, Homo sapiens
ctgatgctggagtat

SEQ ID NO: 2134578 - DNA, 15 bp, Homo sapiens
tgatgctggagtatt

SEQ ID NO: 2134579 - DNA, 15 bp, Homo sapiens
gatgctggagtattt

SEQ ID NO: 2134580 - DNA, 15 bp, Homo sapiens
atgctggagtatttg

SEQ ID NO: 2134581 - DNA, 15 bp, Homo sapiens
tgctggagtatttga

SEQ ID NO: 2134582 - DNA, 15 bp, Homo sapiens
gctggagtatttgaa

SEQ ID NO: 2134583 - DNA, 15 bp, Homo sapiens
ctggagtatttgaac

SEQ ID NO: 2134584 - DNA, 15 bp, Homo sapiens
tggagtatttgaacc

SEQ ID NO: 2134585 - DNA, 15 bp, Homo sapiens
ggagtatttgaacca

SEQ ID NO: 2134586 - DNA, 15 bp, Homo sapiens
gagtatttgaaccag

SEQ ID NO: 2134587 - DNA, 15 bp, Homo sapiens
agtatttgaaccaga

SEQ ID NO: 2134588 - DNA, 15 bp, Homo sapiens
gtatttgaaccagat

SEQ ID NO: 2134589 - DNA, 15 bp, Homo sapiens
tatttgaaccagatg

SEQ ID NO: 2134590 - DNA, 15 bp, Homo sapiens
atttgaaccagatgg

SEQ ID NO: 2134591 - DNA, 15 bp, Homo sapiens
tttgaaccagatggc

SEQ ID NO: 2134592 - DNA, 15 bp, Homo sapiens
ttgaaccagatggct

SEQ ID NO: 2134593 - DNA, 15 bp, Homo sapiens
tgaaccagatggctg

SEQ ID NO: 2134594 - DNA, 15 bp, Homo sapiens
gaaccagatggctgg

SEQ ID NO: 2134595 - DNA, 15 bp, Homo sapiens
aaccagatggctggc

SEQ ID NO: 2134596 - DNA, 15 bp, Homo sapiens
accagatggctggct

SEQ ID NO: 2134597 - DNA, 15 bp, Homo sapiens
ccagatggctggctg

SEQ ID NO: 2134598 - DNA, 15 bp, Homo sapiens
cagatggctggctgt

SEQ ID NO: 2134599 - DNA, 15 bp, Homo sapiens
agatggctggctgtg

SEQ ID NO: 2134600 - DNA, 15 bp, Homo sapiens
gatggctggctgtgc

SEQ ID NO: 2134601 - DNA, 15 bp, Homo sapiens
atggctggctgtgcc

SEQ ID NO: 2134602 - DNA, 15 bp, Homo sapiens
tggctggctgtgcca

SEQ ID NO: 2134603 - DNA, 15 bp, Homo sapiens
ggctggctgtgccac

SEQ ID NO: 2134604 - DNA, 15 bp, Homo sapiens
gctggctgtgccact

SEQ ID NO: 2134605 - DNA, 15 bp, Homo sapiens
ctggctgtgccactc

SEQ ID NO: 2134606 - DNA, 15 bp, Homo sapiens
tggctgtgccactca

SEQ ID NO: 2134607 - DNA, 15 bp, Homo sapiens
ggctgtgccactcag

SEQ ID NO: 2134608 - DNA, 15 bp, Homo sapiens
gctgtgccactcagt

SEQ ID NO: 2134609 - DNA, 15 bp, Homo sapiens
ctgtgccactcagtt

SEQ ID NO: 2134610 - DNA, 15 bp, Homo sapiens
tgtgccactcagtta

SEQ ID NO: 2134611 - DNA, 15 bp, Homo sapiens
gtgccactcagttat

SEQ ID NO: 2134612 - DNA, 15 bp, Homo sapiens
tgccactcagttatt

SEQ ID NO: 2134613 - DNA, 15 bp, Homo sapiens
gccactcagttattc

SEQ ID NO: 2134614 - DNA, 15 bp, Homo sapiens
ccactcagttattct

SEQ ID NO: 2134615 - DNA, 15 bp, Homo sapiens
cactcagttattctc

SEQ ID NO: 2134616 - DNA, 15 bp, Homo sapiens
actcagttattctct

SEQ ID NO: 2134617 - DNA, 15 bp, Homo sapiens
ctcagttattctctc

SEQ ID NO: 2134618 - DNA, 15 bp, Homo sapiens
tcagttattctctcc

SEQ ID NO: 2134619 - DNA, 15 bp, Homo sapiens
cagttattctctcca

SEQ ID NO: 2134620 - DNA, 15 bp, Homo sapiens
agttattctctccat

SEQ ID NO: 2134621 - DNA, 15 bp, Homo sapiens
gttattctctccata

SEQ ID NO: 2134622 - DNA, 15 bp, Homo sapiens
ttattctctccataa

SEQ ID NO: 2134623 - DNA, 15 bp, Homo sapiens
tattctctccataag

SEQ ID NO: 2134624 - DNA, 15 bp, Homo sapiens
attctctccataaga

SEQ ID NO: 2134625 - DNA, 15 bp, Homo sapiens
ttctctccataagac

SEQ ID NO: 2134626 - DNA, 15 bp, Homo sapiens
tctctccataagact

SEQ ID NO: 2134627 - DNA, 15 bp, Homo sapiens
ctctccataagactt

SEQ ID NO: 2134628 - DNA, 15 bp, Homo sapiens
tctccataagacttt

SEQ ID NO: 2134629 - DNA, 15 bp, Homo sapiens
ctccataagactttg

SEQ ID NO: 2134630 - DNA, 15 bp, Homo sapiens
tccataagactttga

SEQ ID NO: 2134631 - DNA, 15 bp, Homo sapiens
ccataagactttgat

SEQ ID NO: 2134632 - DNA, 15 bp, Homo sapiens
cataagactttgata

SEQ ID NO: 2134633 - DNA, 15 bp, Homo sapiens
ataagactttgatat

SEQ ID NO: 2134634 - DNA, 15 bp, Homo sapiens
taagactttgatatt

SEQ ID NO: 2134635 - DNA, 15 bp, Homo sapiens
aagactttgatattt

SEQ ID NO: 2134636 - DNA, 15 bp, Homo sapiens
agactttgatatttt

SEQ ID NO: 2134637 - DNA, 15 bp, Homo sapiens
gactttgatattttg

SEQ ID NO: 2134638 - DNA, 15 bp, Homo sapiens
actttgatattttgt

SEQ ID NO: 2134639 - DNA, 15 bp, Homo sapiens
ctttgatattttgtt

SEQ ID NO: 2134640 - DNA, 15 bp, Homo sapiens
tttgatattttgttg

SEQ ID NO: 2134641 - DNA, 15 bp, Homo sapiens
ttgatattttgttgg

SEQ ID NO: 2134642 - DNA, 15 bp, Homo sapiens
tgatattttgttggt

SEQ ID NO: 2134643 - DNA, 15 bp, Homo sapiens
gatattttgttggtc

SEQ ID NO: 2134644 - DNA, 15 bp, Homo sapiens
atattttgttggtct

SEQ ID NO: 2134645 - DNA, 15 bp, Homo sapiens
tattttgttggtctg

SEQ ID NO: 2134646 - DNA, 15 bp, Homo sapiens
attttgttggtctgc

SEQ ID NO: 2134647 - DNA, 15 bp, Homo sapiens
ttttgttggtctgca

SEQ ID NO: 2134648 - DNA, 15 bp, Homo sapiens
tttgttggtctgcaa

SEQ ID NO: 2134649 - DNA, 15 bp, Homo sapiens
ttgttggtctgcaag

SEQ ID NO: 2134650 - DNA, 15 bp, Homo sapiens
tgttggtctgcaaga

SEQ ID NO: 2134651 - DNA, 15 bp, Homo sapiens
gttggtctgcaagat

SEQ ID NO: 2134652 - DNA, 15 bp, Homo sapiens
ttggtctgcaagatg

SEQ ID NO: 2134653 - DNA, 15 bp, Homo sapiens
tggtctgcaagatga

SEQ ID NO: 2134654 - DNA, 15 bp, Homo sapiens
ggtctgcaagatgac

SEQ ID NO: 2134655 - DNA, 15 bp, Homo sapiens
gtctgcaagatgacg

SEQ ID NO: 2134656 - DNA, 15 bp, Homo sapiens
tctgcaagatgacgg

SEQ ID NO: 2134657 - DNA, 15 bp, Homo sapiens
ctgcaagatgacgga

SEQ ID NO: 2134658 - DNA, 15 bp, Homo sapiens
tgcaagatgacggat

SEQ ID NO: 2134659 - DNA, 15 bp, Homo sapiens
gcaagatgacggatt

SEQ ID NO: 2134660 - DNA, 15 bp, Homo sapiens
caagatgacggattc

SEQ ID NO: 2134661 - DNA, 15 bp, Homo sapiens
aagatgacggattct

SEQ ID NO: 2134662 - DNA, 15 bp, Homo sapiens
agatgacggattctc

SEQ ID NO: 2134663 - DNA, 15 bp, Homo sapiens
gatgacggattctca

SEQ ID NO: 2134664 - DNA, 15 bp, Homo sapiens
atgacggattctcaa

SEQ ID NO: 2134665 - DNA, 15 bp, Homo sapiens
tgacggattctcaaa

SEQ ID NO: 2134666 - DNA, 15 bp, Homo sapiens
gacggattctcaaaa

SEQ ID NO: 2134667 - DNA, 15 bp, Homo sapiens
acggattctcaaaat

SEQ ID NO: 2134668 - DNA, 15 bp, Homo sapiens
cggattctcaaaatt

SEQ ID NO: 2134669 - DNA, 15 bp, Homo sapiens
ggattctcaaaattc

SEQ ID NO: 2134670 - DNA, 15 bp, Homo sapiens
gattctcaaaattct

SEQ ID NO: 2134671 - DNA, 15 bp, Homo sapiens
attctcaaaattctt

SEQ ID NO: 2134672 - DNA, 15 bp, Homo sapiens
ttctcaaaattcttg

SEQ ID NO: 2134673 - DNA, 15 bp, Homo sapiens
tctcaaaattcttgt

SEQ ID NO: 2134674 - DNA, 15 bp, Homo sapiens
ctcaaaattcttgtc

SEQ ID NO: 2134675 - DNA, 15 bp, Homo sapiens
tcaaaattcttgtca

SEQ ID NO: 2134676 - DNA, 15 bp, Homo sapiens
caaaattcttgtcag

SEQ ID NO: 2134677 - DNA, 15 bp, Homo sapiens
aaaattcttgtcagt

SEQ ID NO: 2134678 - DNA, 15 bp, Homo sapiens
aaattcttgtcagtg

SEQ ID NO: 2134679 - DNA, 15 bp, Homo sapiens
aattcttgtcagtga

SEQ ID NO: 2134680 - DNA, 15 bp, Homo sapiens
attcttgtcagtgaa

SEQ ID NO: 2134681 - DNA, 15 bp, Homo sapiens
ttcttgtcagtgaat

SEQ ID NO: 2134682 - DNA, 15 bp, Homo sapiens
tcttgtcagtgaata

SEQ ID NO: 2134683 - DNA, 15 bp, Homo sapiens
cttgtcagtgaatat

SEQ ID NO: 2134684 - DNA, 15 bp, Homo sapiens
ttgtcagtgaatatt

SEQ ID NO: 2134685 - DNA, 15 bp, Homo sapiens
tgtcagtgaatattg

SEQ ID NO: 2134686 - DNA, 15 bp, Homo sapiens
gtcagtgaatattga

SEQ ID NO: 2134687 - DNA, 15 bp, Homo sapiens
tcagtgaatattgaa

SEQ ID NO: 2134688 - DNA, 15 bp, Homo sapiens
cagtgaatattgaac

SEQ ID NO: 2134689 - DNA, 15 bp, Homo sapiens
agtgaatattgaacc

SEQ ID NO: 2134690 - DNA, 15 bp, Homo sapiens
gtgaatattgaaccc

SEQ ID NO: 2134691 - DNA, 15 bp, Homo sapiens
tgaatattgaaccct

SEQ ID NO: 2134692 - DNA, 15 bp, Homo sapiens
gaatattgaacccta

SEQ ID NO: 2134693 - DNA, 15 bp, Homo sapiens
aatattgaaccctag

SEQ ID NO: 2134694 - DNA, 15 bp, Homo sapiens
atattgaaccctagt

SEQ ID NO: 2134695 - DNA, 15 bp, Homo sapiens
tattgaaccctagtg

SEQ ID NO: 2134696 - DNA, 15 bp, Homo sapiens
attgaaccctagtga

SEQ ID NO: 2134697 - DNA, 15 bp, Homo sapiens
ttgaaccctagtgaa

SEQ ID NO: 2134698 - DNA, 15 bp, Homo sapiens
tgaaccctagtgaaa

SEQ ID NO: 2134699 - DNA, 15 bp, Homo sapiens
gaaccctagtgaaat

SEQ ID NO: 2134700 - DNA, 15 bp, Homo sapiens
aaccctagtgaaatg

SEQ ID NO: 2134701 - DNA, 15 bp, Homo sapiens
accctagtgaaatgt

SEQ ID NO: 2134702 - DNA, 15 bp, Homo sapiens
ccctagtgaaatgta

SEQ ID NO: 2134703 - DNA, 15 bp, Homo sapiens
cctagtgaaatgtat

SEQ ID NO: 2134704 - DNA, 15 bp, Homo sapiens
ctagtgaaatgtatg

SEQ ID NO: 2134705 - DNA, 15 bp, Homo sapiens
tagtgaaatgtatgg

SEQ ID NO: 2134706 - DNA, 15 bp, Homo sapiens
agtgaaatgtatggt

SEQ ID NO: 2134707 - DNA, 15 bp, Homo sapiens
gtgaaatgtatggtt

SEQ ID NO: 2134708 - DNA, 15 bp, Homo sapiens
tgaaatgtatggttc

SEQ ID NO: 2134709 - DNA, 15 bp, Homo sapiens
gaaatgtatggttct

SEQ ID NO: 2134710 - DNA, 15 bp, Homo sapiens
aaatgtatggttctg

SEQ ID NO: 2134711 - DNA, 15 bp, Homo sapiens
aatgtatggttctgt

SEQ ID NO: 2134712 - DNA, 15 bp, Homo sapiens
atgtatggttctgta

SEQ ID NO: 2134713 - DNA, 15 bp, Homo sapiens
tgtatggttctgtat

SEQ ID NO: 2134714 - DNA, 15 bp, Homo sapiens
gtatggttctgtatc

SEQ ID NO: 2134715 - DNA, 15 bp, Homo sapiens
tatggttctgtatca

SEQ ID NO: 2134716 - DNA, 15 bp, Homo sapiens
atggttctgtatcag

SEQ ID NO: 2134717 - DNA, 15 bp, Homo sapiens
tggttctgtatcagt

SEQ ID NO: 2134718 - DNA, 15 bp, Homo sapiens
ggttctgtatcagtt

SEQ ID NO: 2134719 - DNA, 15 bp, Homo sapiens
gttctgtatcagttc

SEQ ID NO: 2134720 - DNA, 15 bp, Homo sapiens
ttctgtatcagttcc

SEQ ID NO: 2134721 - DNA, 15 bp, Homo sapiens
tctgtatcagttcca

SEQ ID NO: 2134722 - DNA, 15 bp, Homo sapiens
ctgtatcagttccaa

SEQ ID NO: 2134723 - DNA, 15 bp, Homo sapiens
tgtatcagttccaaa

SEQ ID NO: 2134724 - DNA, 15 bp, Homo sapiens
gtatcagttccaaaa

SEQ ID NO: 2134725 - DNA, 15 bp, Homo sapiens
tatcagttccaaaat

SEQ ID NO: 2134726 - DNA, 15 bp, Homo sapiens
atcagttccaaaatg

SEQ ID NO: 2134727 - DNA, 15 bp, Homo sapiens
tcagttccaaaatgt

SEQ ID NO: 2134728 - DNA, 15 bp, Homo sapiens
cagttccaaaatgta

SEQ ID NO: 2134729 - DNA, 15 bp, Homo sapiens
agttccaaaatgtaa

SEQ ID NO: 2134730 - DNA, 15 bp, Homo sapiens
gttccaaaatgtaac

SEQ ID NO: 2134731 - DNA, 15 bp, Homo sapiens
ttccaaaatgtaacc

SEQ ID NO: 2134732 - DNA, 15 bp, Homo sapiens
tccaaaatgtaacca

SEQ ID NO: 2134733 - DNA, 15 bp, Homo sapiens
ccaaaatgtaaccac

SEQ ID NO: 2134734 - DNA, 15 bp, Homo sapiens
caaaatgtaaccact

SEQ ID NO: 2134735 - DNA, 15 bp, Homo sapiens
aaaatgtaaccactt

SEQ ID NO: 2134736 - DNA, 15 bp, Homo sapiens
aaatgtaaccacttt

SEQ ID NO: 2134737 - DNA, 15 bp, Homo sapiens
aatgtaaccactttc

SEQ ID NO: 2134738 - DNA, 15 bp, Homo sapiens
atgtaaccactttct

SEQ ID NO: 2134739 - DNA, 15 bp, Homo sapiens
tgtaaccactttctc

SEQ ID NO: 2134740 - DNA, 15 bp, Homo sapiens
gtaaccactttctct

SEQ ID NO: 2134741 - DNA, 15 bp, Homo sapiens
taaccactttctcta

SEQ ID NO: 2134742 - DNA, 15 bp, Homo sapiens
aaccactttctctag

SEQ ID NO: 2134743 - DNA, 15 bp, Homo sapiens
accactttctctagc

SEQ ID NO: 2134744 - DNA, 15 bp, Homo sapiens
ccactttctctagcc

SEQ ID NO: 2134745 - DNA, 15 bp, Homo sapiens
cactttctctagcct

SEQ ID NO: 2134746 - DNA, 15 bp, Homo sapiens
actttctctagcctt

SEQ ID NO: 2134747 - DNA, 15 bp, Homo sapiens
ctttctctagcctta

SEQ ID NO: 2134748 - DNA, 15 bp, Homo sapiens
tttctctagccttag

SEQ ID NO: 2134749 - DNA, 15 bp, Homo sapiens
ttctctagccttaga

SEQ ID NO: 2134750 - DNA, 15 bp, Homo sapiens
tctctagccttagat

SEQ ID NO: 2134751 - DNA, 15 bp, Homo sapiens
ctctagccttagatt

SEQ ID NO: 2134752 - DNA, 15 bp, Homo sapiens
tctagccttagattc

SEQ ID NO: 2134753 - DNA, 15 bp, Homo sapiens
ctagccttagattcc

SEQ ID NO: 2134754 - DNA, 15 bp, Homo sapiens
tagccttagattccc

SEQ ID NO: 2134755 - DNA, 15 bp, Homo sapiens
agccttagattccca

SEQ ID NO: 2134756 - DNA, 15 bp, Homo sapiens
gccttagattcccag

SEQ ID NO: 2134757 - DNA, 15 bp, Homo sapiens
ccttagattcccagt

SEQ ID NO: 2134758 - DNA, 15 bp, Homo sapiens
cttagattcccagtt

SEQ ID NO: 2134759 - DNA, 15 bp, Homo sapiens
ttagattcccagttc

SEQ ID NO: 2134760 - DNA, 15 bp, Homo sapiens
tagattcccagttcc

SEQ ID NO: 2134761 - DNA, 15 bp, Homo sapiens
agattcccagttcca

SEQ ID NO: 2134762 - DNA, 15 bp, Homo sapiens
gattcccagttccaa

SEQ ID NO: 2134763 - DNA, 15 bp, Homo sapiens
attcccagttccaaa

SEQ ID NO: 2134764 - DNA, 15 bp, Homo sapiens
ttcccagttccaaaa

SEQ ID NO: 2134765 - DNA, 15 bp, Homo sapiens
tcccagttccaaaat

SEQ ID NO: 2134766 - DNA, 15 bp, Homo sapiens
ccagttccaaaatgt

SEQ ID NO: 2134767 - DNA, 15 bp, Homo sapiens
ccaaaatgtaaccat

SEQ ID NO: 2134768 - DNA, 15 bp, Homo sapiens
caaaatgtaaccatt

SEQ ID NO: 2134769 - DNA, 15 bp, Homo sapiens
aaaatgtaaccattt

SEQ ID NO: 2134770 - DNA, 15 bp, Homo sapiens
aaatgtaaccatttt

SEQ ID NO: 2134771 - DNA, 15 bp, Homo sapiens
aatgtaaccattttc

SEQ ID NO: 2134772 - DNA, 15 bp, Homo sapiens
atgtaaccattttct

SEQ ID NO: 2134773 - DNA, 15 bp, Homo sapiens
tgtaaccattttctc

SEQ ID NO: 2134774 - DNA, 15 bp, Homo sapiens
gtaaccattttctct

SEQ ID NO: 2134775 - DNA, 15 bp, Homo sapiens
taaccattttctcta

SEQ ID NO: 2134776 - DNA, 15 bp, Homo sapiens
aaccattttctctag

SEQ ID NO: 2134777 - DNA, 15 bp, Homo sapiens
accattttctctagc

SEQ ID NO: 2134778 - DNA, 15 bp, Homo sapiens
ccattttctctagcc

SEQ ID NO: 2134779 - DNA, 15 bp, Homo sapiens
cattttctctagcct

SEQ ID NO: 2134780 - DNA, 15 bp, Homo sapiens
attttctctagcctt

SEQ ID NO: 2134781 - DNA, 15 bp, Homo sapiens
ttttctctagcctta

SEQ ID NO: 2134782 - DNA, 15 bp, Homo sapiens
agccttagattcccg

SEQ ID NO: 2134783 - DNA, 15 bp, Homo sapiens
gccttagattcccgt

SEQ ID NO: 2134784 - DNA, 15 bp, Homo sapiens
ccttagattcccgtt

SEQ ID NO: 2134785 - DNA, 15 bp, Homo sapiens
cttagattcccgtta

SEQ ID NO: 2134786 - DNA, 15 bp, Homo sapiens
ttagattcccgttaa

SEQ ID NO: 2134787 - DNA, 15 bp, Homo sapiens
tagattcccgttaag

SEQ ID NO: 2134788 - DNA, 15 bp, Homo sapiens
agattcccgttaagg

SEQ ID NO: 2134789 - DNA, 15 bp, Homo sapiens
gattcccgttaaggg

SEQ ID NO: 2134790 - DNA, 15 bp, Homo sapiens
attcccgttaaggga

SEQ ID NO: 2134791 - DNA, 15 bp, Homo sapiens
ttcccgttaagggaa

SEQ ID NO: 2134792 - DNA, 15 bp, Homo sapiens
tcccgttaagggaaa

SEQ ID NO: 2134793 - DNA, 15 bp, Homo sapiens
cccgttaagggaaag

SEQ ID NO: 2134794 - DNA, 15 bp, Homo sapiens
ccgttaagggaaagg

SEQ ID NO: 2134795 - DNA, 15 bp, Homo sapiens
cgttaagggaaaggg

SEQ ID NO: 2134796 - DNA, 15 bp, Homo sapiens
gttaagggaaaggga

SEQ ID NO: 2134797 - DNA, 15 bp, Homo sapiens
ttaagggaaagggaa

SEQ ID NO: 2134798 - DNA, 15 bp, Homo sapiens
taagggaaagggaat

SEQ ID NO: 2134799 - DNA, 15 bp, Homo sapiens
aagggaaagggaatg

SEQ ID NO: 2134800 - DNA, 15 bp, Homo sapiens
gcttgttgttttaca

SEQ ID NO: 2134801 - DNA, 15 bp, Homo sapiens
cttgttgttttacag

SEQ ID NO: 2134802 - DNA, 15 bp, Homo sapiens
ttgttgttttacagt

SEQ ID NO: 2134803 - DNA, 15 bp, Homo sapiens
tgttgttttacagtg

SEQ ID NO: 2134804 - DNA, 15 bp, Homo sapiens
gttgttttacagtgt

SEQ ID NO: 2134805 - DNA, 15 bp, Homo sapiens
ttgttttacagtgtt

SEQ ID NO: 2134806 - DNA, 15 bp, Homo sapiens
tgttttacagtgtta

SEQ ID NO: 2134807 - DNA, 15 bp, Homo sapiens
gttttacagtgttag

SEQ ID NO: 2134808 - DNA, 15 bp, Homo sapiens
ttttacagtgttagt

SEQ ID NO: 2134809 - DNA, 15 bp, Homo sapiens
tttacagtgttagtg

SEQ ID NO: 2134810 - DNA, 15 bp, Homo sapiens
ttacagtgttagtga

SEQ ID NO: 2134811 - DNA, 15 bp, Homo sapiens
tacagtgttagtgat

SEQ ID NO: 2134812 - DNA, 15 bp, Homo sapiens
acagtgttagtgatc

SEQ ID NO: 2134813 - DNA, 15 bp, Homo sapiens
cagtgttagtgatcc

SEQ ID NO: 2134814 - DNA, 15 bp, Homo sapiens
agtgttagtgatcca

SEQ ID NO: 2134815 - DNA, 15 bp, Homo sapiens
gtgttagtgatccat

SEQ ID NO: 2134816 - DNA, 15 bp, Homo sapiens
tgttagtgatccatt

SEQ ID NO: 2134817 - DNA, 15 bp, Homo sapiens
gttagtgatccattc

SEQ ID NO: 2134818 - DNA, 15 bp, Homo sapiens
ttagtgatccattcc

SEQ ID NO: 2134819 - DNA, 15 bp, Homo sapiens
tagtgatccattccc

SEQ ID NO: 2134820 - DNA, 15 bp, Homo sapiens
agtgatccattccct

SEQ ID NO: 2134821 - DNA, 15 bp, Homo sapiens
gtgatccattccctt

SEQ ID NO: 2134822 - DNA, 15 bp, Homo sapiens
tgatccattcccttt

SEQ ID NO: 2134823 - DNA, 15 bp, Homo sapiens
gatccattccctttg

SEQ ID NO: 2134824 - DNA, 15 bp, Homo sapiens
atccattccctttga

SEQ ID NO: 2134825 - DNA, 15 bp, Homo sapiens
tccattccctttgac

SEQ ID NO: 2134826 - DNA, 15 bp, Homo sapiens
ccattccctttgacg

SEQ ID NO: 2134827 - DNA, 15 bp, Homo sapiens
cattccctttgacga

SEQ ID NO: 2134828 - DNA, 15 bp, Homo sapiens
attccctttgacgat

SEQ ID NO: 2134829 - DNA, 15 bp, Homo sapiens
ttccctttgacgatc

SEQ ID NO: 2134830 - DNA, 15 bp, Homo sapiens
tccctttgacgatcc

SEQ ID NO: 2134831 - DNA, 15 bp, Homo sapiens
ccctttgacgatccc

SEQ ID NO: 2134832 - DNA, 15 bp, Homo sapiens
cctttgacgatccct

SEQ ID NO: 2134833 - DNA, 15 bp, Homo sapiens
ctttgacgatcccta

SEQ ID NO: 2134834 - DNA, 15 bp, Homo sapiens
tttgacgatccctag

SEQ ID NO: 2134835 - DNA, 15 bp, Homo sapiens
ttgacgatccctagg

SEQ ID NO: 2134836 - DNA, 15 bp, Homo sapiens
tgacgatccctaggt

SEQ ID NO: 2134837 - DNA, 15 bp, Homo sapiens
gacgatccctaggtg

SEQ ID NO: 2134838 - DNA, 15 bp, Homo sapiens
acgatccctaggtgg

SEQ ID NO: 2134839 - DNA, 15 bp, Homo sapiens
cgatccctaggtgga

SEQ ID NO: 2134840 - DNA, 15 bp, Homo sapiens
gatccctaggtggag

SEQ ID NO: 2134841 - DNA, 15 bp, Homo sapiens
atccctaggtggaga

SEQ ID NO: 2134842 - DNA, 15 bp, Homo sapiens
tccctaggtggagat

SEQ ID NO: 2134843 - DNA, 15 bp, Homo sapiens
ccctaggtggagatg

SEQ ID NO: 2134844 - DNA, 15 bp, Homo sapiens
cctaggtggagatgg

SEQ ID NO: 2134845 - DNA, 15 bp, Homo sapiens
ctaggtggagatggg

SEQ ID NO: 2134846 - DNA, 15 bp, Homo sapiens
taggtggagatgggg

SEQ ID NO: 2134847 - DNA, 15 bp, Homo sapiens
aggtggagatggggc

SEQ ID NO: 2134848 - DNA, 15 bp, Homo sapiens
ggtggagatggggca

SEQ ID NO: 2134849 - DNA, 15 bp, Homo sapiens
gtggagatggggcat

SEQ ID NO: 2134850 - DNA, 15 bp, Homo sapiens
tggagatggggcatg

SEQ ID NO: 2134851 - DNA, 15 bp, Homo sapiens
ggagatggggcatga

SEQ ID NO: 2134852 - DNA, 15 bp, Homo sapiens
gagatggggcatgag

SEQ ID NO: 2134853 - DNA, 15 bp, Homo sapiens
agatggggcatgagg

SEQ ID NO: 2134854 - DNA, 15 bp, Homo sapiens
gatggggcatgagga

SEQ ID NO: 2134855 - DNA, 15 bp, Homo sapiens
atggggcatgaggat

SEQ ID NO: 2134856 - DNA, 15 bp, Homo sapiens
tggggcatgaggatc

SEQ ID NO: 2134857 - DNA, 15 bp, Homo sapiens
ggggcatgaggatcc

SEQ ID NO: 2134858 - DNA, 15 bp, Homo sapiens
gggcatgaggatcct

SEQ ID NO: 2134859 - DNA, 15 bp, Homo sapiens
ggcatgaggatcctc

SEQ ID NO: 2134860 - DNA, 15 bp, Homo sapiens
gcatgaggatcctcc

SEQ ID NO: 2134861 - DNA, 15 bp, Homo sapiens
catgaggatcctcca

SEQ ID NO: 2134862 - DNA, 15 bp, Homo sapiens
atgaggatcctccag

SEQ ID NO: 2134863 - DNA, 15 bp, Homo sapiens
tgaggatcctccagg

SEQ ID NO: 2134864 - DNA, 15 bp, Homo sapiens
gaggatcctccaggg

SEQ ID NO: 2134865 - DNA, 15 bp, Homo sapiens
aggatcctccagggg

SEQ ID NO: 2134866 - DNA, 15 bp, Homo sapiens
ggatcctccagggga

SEQ ID NO: 2134867 - DNA, 15 bp, Homo sapiens
gatcctccaggggaa

SEQ ID NO: 2134868 - DNA, 15 bp, Homo sapiens
atcctccaggggaaa

SEQ ID NO: 2134869 - DNA, 15 bp, Homo sapiens
tcctccaggggaaaa

SEQ ID NO: 2134870 - DNA, 15 bp, Homo sapiens
cctccaggggaaaag

SEQ ID NO: 2134871 - DNA, 15 bp, Homo sapiens
ctccaggggaaaagc

SEQ ID NO: 2134872 - DNA, 15 bp, Homo sapiens
tccaggggaaaagct

SEQ ID NO: 2134873 - DNA, 15 bp, Homo sapiens
ccaggggaaaagctc

SEQ ID NO: 2134874 - DNA, 15 bp, Homo sapiens
caggggaaaagctca

SEQ ID NO: 2134875 - DNA, 15 bp, Homo sapiens
aggggaaaagctcac

SEQ ID NO: 2134876 - DNA, 15 bp, Homo sapiens
ggggaaaagctcact

SEQ ID NO: 2134877 - DNA, 15 bp, Homo sapiens
gggaaaagctcacta

SEQ ID NO: 2134878 - DNA, 15 bp, Homo sapiens
ggaaaagctcactac

SEQ ID NO: 2134879 - DNA, 15 bp, Homo sapiens
gaaaagctcactacc

SEQ ID NO: 2134880 - DNA, 15 bp, Homo sapiens
aaaagctcactacca

SEQ ID NO: 2134881 - DNA, 15 bp, Homo sapiens
aaagctcactaccac

SEQ ID NO: 2134882 - DNA, 15 bp, Homo sapiens
aagctcactaccact

SEQ ID NO: 2134883 - DNA, 15 bp, Homo sapiens
agctcactaccactg

SEQ ID NO: 2134884 - DNA, 15 bp, Homo sapiens
gctcactaccactgg

SEQ ID NO: 2134885 - DNA, 15 bp, Homo sapiens
ctcactaccactggg

SEQ ID NO: 2134886 - DNA, 15 bp, Homo sapiens
tcactaccactgggc

SEQ ID NO: 2134887 - DNA, 15 bp, Homo sapiens
cactaccactgggca

SEQ ID NO: 2134888 - DNA, 15 bp, Homo sapiens
actaccactgggcaa

SEQ ID NO: 2134889 - DNA, 15 bp, Homo sapiens
ctaccactgggcaac

SEQ ID NO: 2134890 - DNA, 15 bp, Homo sapiens
taccactgggcaaca

SEQ ID NO: 2134891 - DNA, 15 bp, Homo sapiens
accactgggcaacaa

SEQ ID NO: 2134892 - DNA, 15 bp, Homo sapiens
ccactgggcaacaac

SEQ ID NO: 2134893 - DNA, 15 bp, Homo sapiens
cactgggcaacaacc

SEQ ID NO: 2134894 - DNA, 15 bp, Homo sapiens
actgggcaacaaccc

SEQ ID NO: 2134895 - DNA, 15 bp, Homo sapiens
ctgggcaacaaccct

SEQ ID NO: 2134896 - DNA, 15 bp, Homo sapiens
tgggcaacaacccta

SEQ ID NO: 2134897 - DNA, 15 bp, Homo sapiens
gggcaacaaccctag

SEQ ID NO: 2134898 - DNA, 15 bp, Homo sapiens
ggcaacaaccctagg

SEQ ID NO: 2134899 - DNA, 15 bp, Homo sapiens
gcaacaaccctaggt

SEQ ID NO: 2134900 - DNA, 15 bp, Homo sapiens
caacaaccctaggtc

SEQ ID NO: 2134901 - DNA, 15 bp, Homo sapiens
aacaaccctaggtca

SEQ ID NO: 2134902 - DNA, 15 bp, Homo sapiens
acaaccctaggtcag

SEQ ID NO: 2134903 - DNA, 15 bp, Homo sapiens
caaccctaggtcagg

SEQ ID NO: 2134904 - DNA, 15 bp, Homo sapiens
aaccctaggtcagga

SEQ ID NO: 2134905 - DNA, 15 bp, Homo sapiens
accctaggtcaggag

SEQ ID NO: 2134906 - DNA, 15 bp, Homo sapiens
ccctaggtcaggagg

SEQ ID NO: 2134907 - DNA, 15 bp, Homo sapiens
cctaggtcaggaggt

SEQ ID NO: 2134908 - DNA, 15 bp, Homo sapiens
ctaggtcaggaggtt

SEQ ID NO: 2134909 - DNA, 15 bp, Homo sapiens
taggtcaggaggttc

SEQ ID NO: 2134910 - DNA, 15 bp, Homo sapiens
aggtcaggaggttct

SEQ ID NO: 2134911 - DNA, 15 bp, Homo sapiens
ggtcaggaggttctg

SEQ ID NO: 2134912 - DNA, 15 bp, Homo sapiens
gtcaggaggttctgt

SEQ ID NO: 2134913 - DNA, 15 bp, Homo sapiens
tcaggaggttctgtc

SEQ ID NO: 2134914 - DNA, 15 bp, Homo sapiens
caggaggttctgtca

SEQ ID NO: 2134915 - DNA, 15 bp, Homo sapiens
aggaggttctgtcaa

SEQ ID NO: 2134916 - DNA, 15 bp, Homo sapiens
ggaggttctgtcaag

SEQ ID NO: 2134917 - DNA, 15 bp, Homo sapiens
gaggttctgtcaaga

SEQ ID NO: 2134918 - DNA, 15 bp, Homo sapiens
aggttctgtcaagat

SEQ ID NO: 2134919 - DNA, 15 bp, Homo sapiens
ggttctgtcaagata

SEQ ID NO: 2134920 - DNA, 15 bp, Homo sapiens
gttctgtcaagatac

SEQ ID NO: 2134921 - DNA, 15 bp, Homo sapiens
ttctgtcaagatact

SEQ ID NO: 2134922 - DNA, 15 bp, Homo sapiens
tctgtcaagatactt

SEQ ID NO: 2134923 - DNA, 15 bp, Homo sapiens
ctgtcaagatacttt

SEQ ID NO: 2134924 - DNA, 15 bp, Homo sapiens
tgtcaagatactttc

SEQ ID NO: 2134925 - DNA, 15 bp, Homo sapiens
gtcaagatactttcc

SEQ ID NO: 2134926 - DNA, 15 bp, Homo sapiens
tcaagatactttcct

SEQ ID NO: 2134927 - DNA, 15 bp, Homo sapiens
caagatactttcctg

SEQ ID NO: 2134928 - DNA, 15 bp, Homo sapiens
aagatactttcctgg

SEQ ID NO: 2134929 - DNA, 15 bp, Homo sapiens
agatactttcctggt

SEQ ID NO: 2134930 - DNA, 15 bp, Homo sapiens
gatactttcctggtc

SEQ ID NO: 2134931 - DNA, 15 bp, Homo sapiens
atactttcctggtcc

SEQ ID NO: 2134932 - DNA, 15 bp, Homo sapiens
tactttcctggtccc

SEQ ID NO: 2134933 - DNA, 15 bp, Homo sapiens
actttcctggtccca

SEQ ID NO: 2134934 - DNA, 15 bp, Homo sapiens
ctttcctggtcccag

SEQ ID NO: 2134935 - DNA, 15 bp, Homo sapiens
tttcctggtcccaga

SEQ ID NO: 2134936 - DNA, 15 bp, Homo sapiens
ttcctggtcccagat

SEQ ID NO: 2134937 - DNA, 15 bp, Homo sapiens
tcctggtcccagata

SEQ ID NO: 2134938 - DNA, 15 bp, Homo sapiens
cctggtcccagatag

SEQ ID NO: 2134939 - DNA, 15 bp, Homo sapiens
ctggtcccagatagg

SEQ ID NO: 2134940 - DNA, 15 bp, Homo sapiens
gtgggactatagcac

SEQ ID NO: 2134941 - DNA, 15 bp, Homo sapiens
tgggactatagcacg

SEQ ID NO: 2134942 - DNA, 15 bp, Homo sapiens
gggactatagcacgt

SEQ ID NO: 2134943 - DNA, 15 bp, Homo sapiens
ggactatagcacgtg

SEQ ID NO: 2134944 - DNA, 15 bp, Homo sapiens
gactatagcacgtgg

SEQ ID NO: 2134945 - DNA, 15 bp, Homo sapiens
actatagcacgtggc

SEQ ID NO: 2134946 - DNA, 15 bp, Homo sapiens
ctatagcacgtggca

SEQ ID NO: 2134947 - DNA, 15 bp, Homo sapiens
tatagcacgtggcag

SEQ ID NO: 2134948 - DNA, 15 bp, Homo sapiens
atagcacgtggcaga

SEQ ID NO: 2134949 - DNA, 15 bp, Homo sapiens
tagcacgtggcagag

SEQ ID NO: 2134950 - DNA, 15 bp, Homo sapiens
agcacgtggcagagg

SEQ ID NO: 2134951 - DNA, 15 bp, Homo sapiens
gcacgtggcagaggc

SEQ ID NO: 2134952 - DNA, 15 bp, Homo sapiens
cacgtggcagaggct

SEQ ID NO: 2134953 - DNA, 15 bp, Homo sapiens
acgtggcagaggctt

SEQ ID NO: 2134954 - DNA, 15 bp, Homo sapiens
cgtggcagaggctta

SEQ ID NO: 2134955 - DNA, 15 bp, Homo sapiens
gtggcagaggcttac

SEQ ID NO: 2134956 - DNA, 15 bp, Homo sapiens
tggcagaggcttaca

SEQ ID NO: 2134957 - DNA, 15 bp, Homo sapiens
ggcagaggcttacag

SEQ ID NO: 2134958 - DNA, 15 bp, Homo sapiens
gcagaggcttacagc

SEQ ID NO: 2134959 - DNA, 15 bp, Homo sapiens
cagaggcttacagct

SEQ ID NO: 2134960 - DNA, 15 bp, Homo sapiens
agaggcttacagcta

SEQ ID NO: 2134961 - DNA, 15 bp, Homo sapiens
gaggcttacagctaa

SEQ ID NO: 2134962 - DNA, 15 bp, Homo sapiens
aggcttacagctaag

SEQ ID NO: 2134963 - DNA, 15 bp, Homo sapiens
ggcttacagctaagt

SEQ ID NO: 2134964 - DNA, 15 bp, Homo sapiens
gcttacagctaagtt

SEQ ID NO: 2134965 - DNA, 15 bp, Homo sapiens
cttacagctaagttg

SEQ ID NO: 2134966 - DNA, 15 bp, Homo sapiens
ttacagctaagttgt

SEQ ID NO: 2134967 - DNA, 15 bp, Homo sapiens
tacagctaagttgtt

SEQ ID NO: 2134968 - DNA, 15 bp, Homo sapiens
acagctaagttgttc

SEQ ID NO: 2134969 - DNA, 15 bp, Homo sapiens
cagctaagttgttct

SEQ ID NO: 2134970 - DNA, 15 bp, Homo sapiens
agctaagttgttctt

SEQ ID NO: 2134971 - DNA, 15 bp, Homo sapiens
gctaagttgttcttt

SEQ ID NO: 2134972 - DNA, 15 bp, Homo sapiens
ctaagttgttctttt

SEQ ID NO: 2134973 - DNA, 15 bp, Homo sapiens
taagttgttctttta

SEQ ID NO: 2134974 - DNA, 15 bp, Homo sapiens
aagttgttcttttag

SEQ ID NO: 2134975 - DNA, 15 bp, Homo sapiens
agttgttcttttagg

SEQ ID NO: 2134976 - DNA, 15 bp, Homo sapiens
gttgttcttttagga

SEQ ID NO: 2134977 - DNA, 15 bp, Homo sapiens
ttgttcttttaggag

SEQ ID NO: 2134978 - DNA, 15 bp, Homo sapiens
tgttcttttaggaga

SEQ ID NO: 2134979 - DNA, 15 bp, Homo sapiens
gttcttttaggagaa

SEQ ID NO: 2134980 - DNA, 15 bp, Homo sapiens
ttcttttaggagaac

SEQ ID NO: 2134981 - DNA, 15 bp, Homo sapiens
tcttttaggagaaca

SEQ ID NO: 2134982 - DNA, 15 bp, Homo sapiens
cttttaggagaacat

SEQ ID NO: 2134983 - DNA, 15 bp, Homo sapiens
ttttaggagaacatg

SEQ ID NO: 2134984 - DNA, 15 bp, Homo sapiens
tttaggagaacatgg

SEQ ID NO: 2134985 - DNA, 15 bp, Homo sapiens
ttaggagaacatgga

SEQ ID NO: 2134986 - DNA, 15 bp, Homo sapiens
taggagaacatggac

SEQ ID NO: 2134987 - DNA, 15 bp, Homo sapiens
aggagaacatggaca

SEQ ID NO: 2134988 - DNA, 15 bp, Homo sapiens
ggagaacatggacaa

SEQ ID NO: 2134989 - DNA, 15 bp, Homo sapiens
gagaacatggacaac

SEQ ID NO: 2134990 - DNA, 15 bp, Homo sapiens
agaacatggacaact

SEQ ID NO: 2134991 - DNA, 15 bp, Homo sapiens
gaacatggacaactg

SEQ ID NO: 2134992 - DNA, 15 bp, Homo sapiens
aacatggacaactgt

SEQ ID NO: 2134993 - DNA, 15 bp, Homo sapiens
acatggacaactgtc

SEQ ID NO: 2134994 - DNA, 15 bp, Homo sapiens
catggacaactgtca

SEQ ID NO: 2134995 - DNA, 15 bp, Homo sapiens
atggacaactgtcac

SEQ ID NO: 2134996 - DNA, 15 bp, Homo sapiens
tggacaactgtcaca

SEQ ID NO: 2134997 - DNA, 15 bp, Homo sapiens
ggacaactgtcacat

SEQ ID NO: 2134998 - DNA, 15 bp, Homo sapiens
gacaactgtcacatc

SEQ ID NO: 2134999 - DNA, 15 bp, Homo sapiens
acaactgtcacatca

SEQ ID NO: 2135000 - DNA, 15 bp, Homo sapiens
caactgtcacatcag

SEQ ID NO: 2135001 - DNA, 15 bp, Homo sapiens
aactgtcacatcagt

SEQ ID NO: 2135002 - DNA, 15 bp, Homo sapiens
actgtcacatcagtg

SEQ ID NO: 2135003 - DNA, 15 bp, Homo sapiens
ctgtcacatcagtga

SEQ ID NO: 2135004 - DNA, 15 bp, Homo sapiens
tgtcacatcagtgac

SEQ ID NO: 2135005 - DNA, 15 bp, Homo sapiens
gtcacatcagtgaca

SEQ ID NO: 2135006 - DNA, 15 bp, Homo sapiens
tcacatcagtgacat

SEQ ID NO: 2135007 - DNA, 15 bp, Homo sapiens
cacatcagtgacatt

SEQ ID NO: 2135008 - DNA, 15 bp, Homo sapiens
acatcagtgacattg

SEQ ID NO: 2135009 - DNA, 15 bp, Homo sapiens
catcagtgacattga

SEQ ID NO: 2135010 - DNA, 15 bp, Homo sapiens
atcagtgacattgat

SEQ ID NO: 2135011 - DNA, 15 bp, Homo sapiens
tcagtgacattgatc

SEQ ID NO: 2135012 - DNA, 15 bp, Homo sapiens
cagtgacattgatca

SEQ ID NO: 2135013 - DNA, 15 bp, Homo sapiens
agtgacattgatcac

SEQ ID NO: 2135014 - DNA, 15 bp, Homo sapiens
gtgacattgatcaca

SEQ ID NO: 2135015 - DNA, 15 bp, Homo sapiens
tgacattgatcacat

SEQ ID NO: 2135016 - DNA, 15 bp, Homo sapiens
gacattgatcacatg

SEQ ID NO: 2135017 - DNA, 15 bp, Homo sapiens
acattgatcacatgg

SEQ ID NO: 2135018 - DNA, 15 bp, Homo sapiens
cattgatcacatggg

SEQ ID NO: 2135019 - DNA, 15 bp, Homo sapiens
attgatcacatgggc

SEQ ID NO: 2135020 - DNA, 15 bp, Homo sapiens
ttgatcacatgggca

SEQ ID NO: 2135021 - DNA, 15 bp, Homo sapiens
tgatcacatgggcaa

SEQ ID NO: 2135022 - DNA, 15 bp, Homo sapiens
gatcacatgggcaaa

SEQ ID NO: 2135023 - DNA, 15 bp, Homo sapiens
atcacatgggcaaat

SEQ ID NO: 2135024 - DNA, 15 bp, Homo sapiens
tcacatgggcaaatc

SEQ ID NO: 2135025 - DNA, 15 bp, Homo sapiens
cacatgggcaaatca

SEQ ID NO: 2135026 - DNA, 15 bp, Homo sapiens
acatgggcaaatcat

SEQ ID NO: 2135027 - DNA, 15 bp, Homo sapiens
catgggcaaatcatt

SEQ ID NO: 2135028 - DNA, 15 bp, Homo sapiens
atgggcaaatcattc

SEQ ID NO: 2135029 - DNA, 15 bp, Homo sapiens
tgggcaaatcattct

SEQ ID NO: 2135030 - DNA, 15 bp, Homo sapiens
gggcaaatcattctg

SEQ ID NO: 2135031 - DNA, 15 bp, Homo sapiens
ggcaaatcattctgt

SEQ ID NO: 2135032 - DNA, 15 bp, Homo sapiens
gcaaatcattctgtt

SEQ ID NO: 2135033 - DNA, 15 bp, Homo sapiens
caaatcattctgttc

SEQ ID NO: 2135034 - DNA, 15 bp, Homo sapiens
aaatcattctgttcc

SEQ ID NO: 2135035 - DNA, 15 bp, Homo sapiens
aatcattctgttcca

SEQ ID NO: 2135036 - DNA, 15 bp, Homo sapiens
atcattctgttccat

SEQ ID NO: 2135037 - DNA, 15 bp, Homo sapiens
tcattctgttccatg

SEQ ID NO: 2135038 - DNA, 15 bp, Homo sapiens
cattctgttccatgt

SEQ ID NO: 2135039 - DNA, 15 bp, Homo sapiens
attctgttccatgtg

SEQ ID NO: 2135040 - DNA, 15 bp, Homo sapiens
ttctgttccatgtgg

SEQ ID NO: 2135041 - DNA, 15 bp, Homo sapiens
tctgttccatgtggt

SEQ ID NO: 2135042 - DNA, 15 bp, Homo sapiens
ctgttccatgtggtc

SEQ ID NO: 2135043 - DNA, 15 bp, Homo sapiens
tgttccatgtggtcc

SEQ ID NO: 2135044 - DNA, 15 bp, Homo sapiens
gttccatgtggtccc

SEQ ID NO: 2135045 - DNA, 15 bp, Homo sapiens
ttccatgtggtcccc

SEQ ID NO: 2135046 - DNA, 15 bp, Homo sapiens
tccatgtggtcccca

SEQ ID NO: 2135047 - DNA, 15 bp, Homo sapiens
ccatgtggtccccaa

SEQ ID NO: 2135048 - DNA, 15 bp, Homo sapiens
catgtggtccccaaa

SEQ ID NO: 2135049 - DNA, 15 bp, Homo sapiens
atgtggtccccaaag

SEQ ID NO: 2135050 - DNA, 15 bp, Homo sapiens
tgtggtccccaaagt

SEQ ID NO: 2135051 - DNA, 15 bp, Homo sapiens
gtggtccccaaagtc

SEQ ID NO: 2135052 - DNA, 15 bp, Homo sapiens
tggtccccaaagtct

SEQ ID NO: 2135053 - DNA, 15 bp, Homo sapiens
ggtccccaaagtctc

SEQ ID NO: 2135054 - DNA, 15 bp, Homo sapiens
gtccccaaagtctct

SEQ ID NO: 2135055 - DNA, 15 bp, Homo sapiens
tccccaaagtctctc

SEQ ID NO: 2135056 - DNA, 15 bp, Homo sapiens
ccccaaagtctctct

SEQ ID NO: 2135057 - DNA, 15 bp, Homo sapiens
cccaaagtctctctt

SEQ ID NO: 2135058 - DNA, 15 bp, Homo sapiens
ccaaagtctctctta

SEQ ID NO: 2135059 - DNA, 15 bp, Homo sapiens
caaagtctctcttaa

SEQ ID NO: 2135060 - DNA, 15 bp, Homo sapiens
aaagtctctcttaaa

SEQ ID NO: 2135061 - DNA, 15 bp, Homo sapiens
aagtctctcttaaag

SEQ ID NO: 2135062 - DNA, 15 bp, Homo sapiens
agtctctcttaaagc

SEQ ID NO: 2135063 - DNA, 15 bp, Homo sapiens
gtctctcttaaagcc

SEQ ID NO: 2135064 - DNA, 15 bp, Homo sapiens
tctctcttaaagcct

SEQ ID NO: 2135065 - DNA, 15 bp, Homo sapiens
ctctcttaaagcctt

SEQ ID NO: 2135066 - DNA, 15 bp, Homo sapiens
tctcttaaagcctta

SEQ ID NO: 2135067 - DNA, 15 bp, Homo sapiens
ctcttaaagccttac

SEQ ID NO: 2135068 - DNA, 15 bp, Homo sapiens
tcttaaagccttaca

SEQ ID NO: 2135069 - DNA, 15 bp, Homo sapiens
cttaaagccttacag

SEQ ID NO: 2135070 - DNA, 15 bp, Homo sapiens
ttaaagccttacaga

SEQ ID NO: 2135071 - DNA, 15 bp, Homo sapiens
taaagccttacagaa

SEQ ID NO: 2135072 - DNA, 15 bp, Homo sapiens
aaagccttacagaag

SEQ ID NO: 2135073 - DNA, 15 bp, Homo sapiens
aagccttacagaaga

SEQ ID NO: 2135074 - DNA, 15 bp, Homo sapiens
agccttacagaagaa

SEQ ID NO: 2135075 - DNA, 15 bp, Homo sapiens
gccttacagaagaac

SEQ ID NO: 2135076 - DNA, 15 bp, Homo sapiens
ccttacagaagaact

SEQ ID NO: 2135077 - DNA, 15 bp, Homo sapiens
cttacagaagaactt

SEQ ID NO: 2135078 - DNA, 15 bp, Homo sapiens
ttacagaagaacttt

SEQ ID NO: 2135079 - DNA, 15 bp, Homo sapiens
tacagaagaactttg

SEQ ID NO: 2135080 - DNA, 15 bp, Homo sapiens
acagaagaactttgc

SEQ ID NO: 2135081 - DNA, 15 bp, Homo sapiens
cagaagaactttgcc

SEQ ID NO: 2135082 - DNA, 15 bp, Homo sapiens
agaagaactttgcca

SEQ ID NO: 2135083 - DNA, 15 bp, Homo sapiens
gaagaactttgccaa

SEQ ID NO: 2135084 - DNA, 15 bp, Homo sapiens
aagaactttgccaat

SEQ ID NO: 2135085 - DNA, 15 bp, Homo sapiens
agaactttgccaatc

SEQ ID NO: 2135086 - DNA, 15 bp, Homo sapiens
gaactttgccaatca

SEQ ID NO: 2135087 - DNA, 15 bp, Homo sapiens
aactttgccaatcat

SEQ ID NO: 2135088 - DNA, 15 bp, Homo sapiens
actttgccaatcatt

SEQ ID NO: 2135089 - DNA, 15 bp, Homo sapiens
ctttgccaatcattt

SEQ ID NO: 2135090 - DNA, 15 bp, Homo sapiens
tttgccaatcattta

SEQ ID NO: 2135091 - DNA, 15 bp, Homo sapiens
ttgccaatcatttac

SEQ ID NO: 2135092 - DNA, 15 bp, Homo sapiens
tgccaatcatttaca

SEQ ID NO: 2135093 - DNA, 15 bp, Homo sapiens
gccaatcatttacat

SEQ ID NO: 2135094 - DNA, 15 bp, Homo sapiens
ccaatcatttacata

SEQ ID NO: 2135095 - DNA, 15 bp, Homo sapiens
caatcatttacatac

SEQ ID NO: 2135096 - DNA, 15 bp, Homo sapiens
aatcatttacatact

SEQ ID NO: 2135097 - DNA, 15 bp, Homo sapiens
atcatttacatactt

SEQ ID NO: 2135098 - DNA, 15 bp, Homo sapiens
tcatttacatacttc

SEQ ID NO: 2135099 - DNA, 15 bp, Homo sapiens
catttacatacttca

SEQ ID NO: 2135100 - DNA, 15 bp, Homo sapiens
atttacatacttcag

SEQ ID NO: 2135101 - DNA, 15 bp, Homo sapiens
tttacatacttcagg

SEQ ID NO: 2135102 - DNA, 15 bp, Homo sapiens
ttacatacttcagga

SEQ ID NO: 2135103 - DNA, 15 bp, Homo sapiens
tacatacttcaggat

SEQ ID NO: 2135104 - DNA, 15 bp, Homo sapiens
acatacttcaggatg

SEQ ID NO: 2135105 - DNA, 15 bp, Homo sapiens
catacttcaggatgg

SEQ ID NO: 2135106 - DNA, 15 bp, Homo sapiens
atacttcaggatggc

SEQ ID NO: 2135107 - DNA, 15 bp, Homo sapiens
tacttcaggatggct

SEQ ID NO: 2135108 - DNA, 15 bp, Homo sapiens
acttcaggatggctt

SEQ ID NO: 2135109 - DNA, 15 bp, Homo sapiens
cttcaggatggcttg

SEQ ID NO: 2135110 - DNA, 15 bp, Homo sapiens
ttcaggatggcttgg

SEQ ID NO: 2135111 - DNA, 15 bp, Homo sapiens
tcaggatggcttggg

SEQ ID NO: 2135112 - DNA, 15 bp, Homo sapiens
caggatggcttggga

SEQ ID NO: 2135113 - DNA, 15 bp, Homo sapiens
aggatggcttgggat

SEQ ID NO: 2135114 - DNA, 15 bp, Homo sapiens
ggatggcttgggatg

SEQ ID NO: 2135115 - DNA, 15 bp, Homo sapiens
gatggcttgggatgc

SEQ ID NO: 2135116 - DNA, 15 bp, Homo sapiens
atggcttgggatgcc

SEQ ID NO: 2135117 - DNA, 15 bp, Homo sapiens
tggcttgggatgcca

SEQ ID NO: 2135118 - DNA, 15 bp, Homo sapiens
ggcttgggatgccat

SEQ ID NO: 2135119 - DNA, 15 bp, Homo sapiens
gcttgggatgccatg

SEQ ID NO: 2135120 - DNA, 15 bp, Homo sapiens
cttgggatgccatgg

SEQ ID NO: 2135121 - DNA, 15 bp, Homo sapiens
ttgggatgccatggt

SEQ ID NO: 2135122 - DNA, 15 bp, Homo sapiens
tgggatgccatggtg

SEQ ID NO: 2135123 - DNA, 15 bp, Homo sapiens
gggatgccatggtgt

SEQ ID NO: 2135124 - DNA, 15 bp, Homo sapiens
ggatgccatggtgta

SEQ ID NO: 2135125 - DNA, 15 bp, Homo sapiens
gatgccatggtgtat

SEQ ID NO: 2135126 - DNA, 15 bp, Homo sapiens
atgccatggtgtata

SEQ ID NO: 2135127 - DNA, 15 bp, Homo sapiens
tgccatggtgtataa

SEQ ID NO: 2135128 - DNA, 15 bp, Homo sapiens
gccatggtgtataat

SEQ ID NO: 2135129 - DNA, 15 bp, Homo sapiens
ccatggtgtataata

SEQ ID NO: 2135130 - DNA, 15 bp, Homo sapiens
catggtgtataatac

SEQ ID NO: 2135131 - DNA, 15 bp, Homo sapiens
atggtgtataataca

SEQ ID NO: 2135132 - DNA, 15 bp, Homo sapiens
tggtgtataatacaa

SEQ ID NO: 2135133 - DNA, 15 bp, Homo sapiens
ggtgtataatacaac

SEQ ID NO: 2135134 - DNA, 15 bp, Homo sapiens
gtgtataatacaaca

SEQ ID NO: 2135135 - DNA, 15 bp, Homo sapiens
tgtataatacaacaa

SEQ ID NO: 2135136 - DNA, 15 bp, Homo sapiens
gtataatacaacaag

SEQ ID NO: 2135137 - DNA, 15 bp, Homo sapiens
tataatacaacaagt

SEQ ID NO: 2135138 - DNA, 15 bp, Homo sapiens
ataatacaacaagtg

SEQ ID NO: 2135139 - DNA, 15 bp, Homo sapiens
taatacaacaagtga

SEQ ID NO: 2135140 - DNA, 15 bp, Homo sapiens
aatacaacaagtgag

SEQ ID NO: 2135141 - DNA, 15 bp, Homo sapiens
atacaacaagtgaga

SEQ ID NO: 2135142 - DNA, 15 bp, Homo sapiens
tacaacaagtgagag

SEQ ID NO: 2135143 - DNA, 15 bp, Homo sapiens
acaacaagtgagagg

SEQ ID NO: 2135144 - DNA, 15 bp, Homo sapiens
caacaagtgagaggt

SEQ ID NO: 2135145 - DNA, 15 bp, Homo sapiens
aacaagtgagaggtg

SEQ ID NO: 2135146 - DNA, 15 bp, Homo sapiens
acaagtgagaggtgt

SEQ ID NO: 2135147 - DNA, 15 bp, Homo sapiens
caagtgagaggtgtg

SEQ ID NO: 2135148 - DNA, 15 bp, Homo sapiens
aagtgagaggtgtgt

SEQ ID NO: 2135149 - DNA, 15 bp, Homo sapiens
agtgagaggtgtgtc

SEQ ID NO: 2135150 - DNA, 15 bp, Homo sapiens
gtgagaggtgtgtct

SEQ ID NO: 2135151 - DNA, 15 bp, Homo sapiens
tgagaggtgtgtctt

SEQ ID NO: 2135152 - DNA, 15 bp, Homo sapiens
gagaggtgtgtcttt

SEQ ID NO: 2135153 - DNA, 15 bp, Homo sapiens
agaggtgtgtctttt

SEQ ID NO: 2135154 - DNA, 15 bp, Homo sapiens
gaggtgtgtcttttt

SEQ ID NO: 2135155 - DNA, 15 bp, Homo sapiens
aggtgtgtcttttta

SEQ ID NO: 2135156 - DNA, 15 bp, Homo sapiens
ggtgtgtctttttat

SEQ ID NO: 2135157 - DNA, 15 bp, Homo sapiens
gtgtgtctttttatg

SEQ ID NO: 2135158 - DNA, 15 bp, Homo sapiens
tgtgtctttttatgc

SEQ ID NO: 2135159 - DNA, 15 bp, Homo sapiens
gtgtctttttatgct

SEQ ID NO: 2135160 - DNA, 15 bp, Homo sapiens
tgtctttttatgcta

SEQ ID NO: 2135161 - DNA, 15 bp, Homo sapiens
gtctttttatgctat

SEQ ID NO: 2135162 - DNA, 15 bp, Homo sapiens
tctttttatgctatg

SEQ ID NO: 2135163 - DNA, 15 bp, Homo sapiens
ctttttatgctatgg

SEQ ID NO: 2135164 - DNA, 15 bp, Homo sapiens
tttttatgctatggt

SEQ ID NO: 2135165 - DNA, 15 bp, Homo sapiens
ttttatgctatggtt

SEQ ID NO: 2135166 - DNA, 15 bp, Homo sapiens
tttatgctatggttg

SEQ ID NO: 2135167 - DNA, 15 bp, Homo sapiens
ttatgctatggttgc

SEQ ID NO: 2135168 - DNA, 15 bp, Homo sapiens
tatgctatggttgct

SEQ ID NO: 2135169 - DNA, 15 bp, Homo sapiens
atgctatggttgctg

SEQ ID NO: 2135170 - DNA, 15 bp, Homo sapiens
tgctatggttgctga

SEQ ID NO: 2135171 - DNA, 15 bp, Homo sapiens
gctatggttgctgat

SEQ ID NO: 2135172 - DNA, 15 bp, Homo sapiens
ctatggttgctgatt

SEQ ID NO: 2135173 - DNA, 15 bp, Homo sapiens
tatggttgctgattg

SEQ ID NO: 2135174 - DNA, 15 bp, Homo sapiens
atggttgctgattga

SEQ ID NO: 2135175 - DNA, 15 bp, Homo sapiens
tggttgctgattgat

SEQ ID NO: 2135176 - DNA, 15 bp, Homo sapiens
ggttgctgattgatg

SEQ ID NO: 2135177 - DNA, 15 bp, Homo sapiens
gttgctgattgatgg

SEQ ID NO: 2135178 - DNA, 15 bp, Homo sapiens
ttgctgattgatgga

SEQ ID NO: 2135179 - DNA, 15 bp, Homo sapiens
tgctgattgatggaa

SEQ ID NO: 2135180 - DNA, 15 bp, Homo sapiens
gctgattgatggaag

SEQ ID NO: 2135181 - DNA, 15 bp, Homo sapiens
ctgattgatggaagc

SEQ ID NO: 2135182 - DNA, 15 bp, Homo sapiens
tgattgatggaagcc

SEQ ID NO: 2135183 - DNA, 15 bp, Homo sapiens
gattgatggaagccg

SEQ ID NO: 2135184 - DNA, 15 bp, Homo sapiens
attgatggaagccgc

SEQ ID NO: 2135185 - DNA, 15 bp, Homo sapiens
ttgatggaagccgca

SEQ ID NO: 2135186 - DNA, 15 bp, Homo sapiens
tgatggaagccgcat

SEQ ID NO: 2135187 - DNA, 15 bp, Homo sapiens
gatggaagccgcata

SEQ ID NO: 2135188 - DNA, 15 bp, Homo sapiens
atggaagccgcataa

SEQ ID NO: 2135189 - DNA, 15 bp, Homo sapiens
tggaagccgcataaa

SEQ ID NO: 2135190 - DNA, 15 bp, Homo sapiens
ggaagccgcataaat

SEQ ID NO: 2135191 - DNA, 15 bp, Homo sapiens
gaagccgcataaata

SEQ ID NO: 2135192 - DNA, 15 bp, Homo sapiens
aagccgcataaatac

SEQ ID NO: 2135193 - DNA, 15 bp, Homo sapiens
agccgcataaataca

SEQ ID NO: 2135194 - DNA, 15 bp, Homo sapiens
gccgcataaatacaa

SEQ ID NO: 2135195 - DNA, 15 bp, Homo sapiens
ccgcataaatacaaa

SEQ ID NO: 2135196 - DNA, 15 bp, Homo sapiens
cgcataaatacaaat

SEQ ID NO: 2135197 - DNA, 15 bp, Homo sapiens
gcataaatacaaatg

SEQ ID NO: 2135198 - DNA, 15 bp, Homo sapiens
cataaatacaaatgg

SEQ ID NO: 2135199 - DNA, 15 bp, Homo sapiens
ataaatacaaatgga

SEQ ID NO: 2135200 - DNA, 15 bp, Homo sapiens
taaatacaaatggaa

SEQ ID NO: 2135201 - DNA, 15 bp, Homo sapiens
aaatacaaatggaaa

SEQ ID NO: 2135202 - DNA, 15 bp, Homo sapiens
aatacaaatggaaac

SEQ ID NO: 2135203 - DNA, 15 bp, Homo sapiens
atacaaatggaaacc

SEQ ID NO: 2135204 - DNA, 15 bp, Homo sapiens
tacaaatggaaacct

SEQ ID NO: 2135205 - DNA, 15 bp, Homo sapiens
acaaatggaaacctg

SEQ ID NO: 2135206 - DNA, 15 bp, Homo sapiens
caaatggaaacctga

SEQ ID NO: 2135207 - DNA, 15 bp, Homo sapiens
aaatggaaacctgac

SEQ ID NO: 2135208 - DNA, 15 bp, Homo sapiens
aatggaaacctgact

SEQ ID NO: 2135209 - DNA, 15 bp, Homo sapiens
atggaaacctgacta

SEQ ID NO: 2135210 - DNA, 15 bp, Homo sapiens
tggaaacctgactaa

SEQ ID NO: 2135211 - DNA, 15 bp, Homo sapiens
ggaaacctgactaaa

SEQ ID NO: 2135212 - DNA, 15 bp, Homo sapiens
gaaacctgactaaaa

SEQ ID NO: 2135213 - DNA, 15 bp, Homo sapiens
aaacctgactaaaaa

SEQ ID NO: 2135214 - DNA, 15 bp, Homo sapiens
aacctgactaaaaat

SEQ ID NO: 2135215 - DNA, 15 bp, Homo sapiens
gatgaccagtcttcc

SEQ ID NO: 2135216 - DNA, 15 bp, Homo sapiens
atgaccagtcttcca

SEQ ID NO: 2135217 - DNA, 15 bp, Homo sapiens
tgaccagtcttccat

SEQ ID NO: 2135218 - DNA, 15 bp, Homo sapiens
gaccagtcttccata

SEQ ID NO: 2135219 - DNA, 15 bp, Homo sapiens
accagtcttccatat

SEQ ID NO: 2135220 - DNA, 15 bp, Homo sapiens
ccagtcttccatatt

SEQ ID NO: 2135221 - DNA, 15 bp, Homo sapiens
cagtcttccatatta

SEQ ID NO: 2135222 - DNA, 15 bp, Homo sapiens
agtcttccatattac

SEQ ID NO: 2135223 - DNA, 15 bp, Homo sapiens
gtcttccatattact

SEQ ID NO: 2135224 - DNA, 15 bp, Homo sapiens
tcttccatattactg

SEQ ID NO: 2135225 - DNA, 15 bp, Homo sapiens
cttccatattactga

SEQ ID NO: 2135226 - DNA, 15 bp, Homo sapiens
ttccatattactgac

SEQ ID NO: 2135227 - DNA, 15 bp, Homo sapiens
tccatattactgact

SEQ ID NO: 2135228 - DNA, 15 bp, Homo sapiens
ccatattactgactg

SEQ ID NO: 2135229 - DNA, 15 bp, Homo sapiens
catattactgactgg

SEQ ID NO: 2135230 - DNA, 15 bp, Homo sapiens
atattactgactggg

SEQ ID NO: 2135231 - DNA, 15 bp, Homo sapiens
tattactgactgggt

SEQ ID NO: 2135232 - DNA, 15 bp, Homo sapiens
attactgactgggtt

SEQ ID NO: 2135233 - DNA, 15 bp, Homo sapiens
ttactgactgggttc

SEQ ID NO: 2135234 - DNA, 15 bp, Homo sapiens
tactgactgggttca

SEQ ID NO: 2135235 - DNA, 15 bp, Homo sapiens
actgactgggttcac

SEQ ID NO: 2135236 - DNA, 15 bp, Homo sapiens
ctgactgggttcact

SEQ ID NO: 2135237 - DNA, 15 bp, Homo sapiens
tgactgggttcactg

SEQ ID NO: 2135238 - DNA, 15 bp, Homo sapiens
gactgggttcactga

SEQ ID NO: 2135239 - DNA, 15 bp, Homo sapiens
actgggttcactgaa

SEQ ID NO: 2135240 - DNA, 15 bp, Homo sapiens
ctgggttcactgaag

SEQ ID NO: 2135241 - DNA, 15 bp, Homo sapiens
tgggttcactgaagc

SEQ ID NO: 2135242 - DNA, 15 bp, Homo sapiens
gggttcactgaagca

SEQ ID NO: 2135243 - DNA, 15 bp, Homo sapiens
ggttcactgaagcaa

SEQ ID NO: 2135244 - DNA, 15 bp, Homo sapiens
gttcactgaagcaac

SEQ ID NO: 2135245 - DNA, 15 bp, Homo sapiens
ttcactgaagcaact

SEQ ID NO: 2135246 - DNA, 15 bp, Homo sapiens
tcactgaagcaactc

SEQ ID NO: 2135247 - DNA, 15 bp, Homo sapiens
cactgaagcaactca

SEQ ID NO: 2135248 - DNA, 15 bp, Homo sapiens
actgaagcaactcaa

SEQ ID NO: 2135249 - DNA, 15 bp, Homo sapiens
ctgaagcaactcaaa

SEQ ID NO: 2135250 - DNA, 15 bp, Homo sapiens
tgaagcaactcaaag

SEQ ID NO: 2135251 - DNA, 15 bp, Homo sapiens
gaagcaactcaaaga

SEQ ID NO: 2135252 - DNA, 15 bp, Homo sapiens
aagcaactcaaagac

SEQ ID NO: 2135253 - DNA, 15 bp, Homo sapiens
agcaactcaaagaca

SEQ ID NO: 2135254 - DNA, 15 bp, Homo sapiens
gcaactcaaagacat

SEQ ID NO: 2135255 - DNA, 15 bp, Homo sapiens
caactcaaagacatt

SEQ ID NO: 2135256 - DNA, 15 bp, Homo sapiens
aactcaaagacatta

SEQ ID NO: 2135257 - DNA, 15 bp, Homo sapiens
actcaaagacattat

SEQ ID NO: 2135258 - DNA, 15 bp, Homo sapiens
ctcaaagacattatg

SEQ ID NO: 2135259 - DNA, 15 bp, Homo sapiens
tcaaagacattatgg

SEQ ID NO: 2135260 - DNA, 15 bp, Homo sapiens
caaagacattatggt

SEQ ID NO: 2135261 - DNA, 15 bp, Homo sapiens
aaagacattatggtc

SEQ ID NO: 2135262 - DNA, 15 bp, Homo sapiens
aagacattatggtct

SEQ ID NO: 2135263 - DNA, 15 bp, Homo sapiens
agacattatggtctt

SEQ ID NO: 2135264 - DNA, 15 bp, Homo sapiens
gacattatggtcttc

SEQ ID NO: 2135265 - DNA, 15 bp, Homo sapiens
acattatggtcttct

SEQ ID NO: 2135266 - DNA, 15 bp, Homo sapiens
cattatggtcttctt

SEQ ID NO: 2135267 - DNA, 15 bp, Homo sapiens
attatggtcttctta

SEQ ID NO: 2135268 - DNA, 15 bp, Homo sapiens
ttatggtcttcttac

SEQ ID NO: 2135269 - DNA, 15 bp, Homo sapiens
tatggtcttcttacc

SEQ ID NO: 2135270 - DNA, 15 bp, Homo sapiens
atggtcttcttacca

SEQ ID NO: 2135271 - DNA, 15 bp, Homo sapiens
tggtcttcttaccag

SEQ ID NO: 2135272 - DNA, 15 bp, Homo sapiens
ggtcttcttaccagt

SEQ ID NO: 2135273 - DNA, 15 bp, Homo sapiens
gtcttcttaccagtt

SEQ ID NO: 2135274 - DNA, 15 bp, Homo sapiens
tcttcttaccagttg

SEQ ID NO: 2135275 - DNA, 15 bp, Homo sapiens
cttcttaccagttgt

SEQ ID NO: 2135276 - DNA, 15 bp, Homo sapiens
ttcttaccagttgta

SEQ ID NO: 2135277 - DNA, 15 bp, Homo sapiens
tcttaccagttgtat

SEQ ID NO: 2135278 - DNA, 15 bp, Homo sapiens
cttaccagttgtatc

SEQ ID NO: 2135279 - DNA, 15 bp, Homo sapiens
ttaccagttgtatca

SEQ ID NO: 2135280 - DNA, 15 bp, Homo sapiens
taccagttgtatcac

SEQ ID NO: 2135281 - DNA, 15 bp, Homo sapiens
accagttgtatcaca

SEQ ID NO: 2135282 - DNA, 15 bp, Homo sapiens
ccagttgtatcacag

SEQ ID NO: 2135283 - DNA, 15 bp, Homo sapiens
cagttgtatcacaga

SEQ ID NO: 2135284 - DNA, 15 bp, Homo sapiens
agttgtatcacagaa

SEQ ID NO: 2135285 - DNA, 15 bp, Homo sapiens
gttgtatcacagaag

SEQ ID NO: 2135286 - DNA, 15 bp, Homo sapiens
ttgtatcacagaaga

SEQ ID NO: 2135287 - DNA, 15 bp, Homo sapiens
tgtatcacagaagaa

SEQ ID NO: 2135288 - DNA, 15 bp, Homo sapiens
gtatcacagaagaat

SEQ ID NO: 2135289 - DNA, 15 bp, Homo sapiens
tatcacagaagaatt

SEQ ID NO: 2135290 - DNA, 15 bp, Homo sapiens
atcacagaagaattt

SEQ ID NO: 2135291 - DNA, 15 bp, Homo sapiens
tcacagaagaattta

SEQ ID NO: 2135292 - DNA, 15 bp, Homo sapiens
cacagaagaatttag

SEQ ID NO: 2135293 - DNA, 15 bp, Homo sapiens
acagaagaatttagc

SEQ ID NO: 2135294 - DNA, 15 bp, Homo sapiens
cagaagaatttagcc

SEQ ID NO: 2135295 - DNA, 15 bp, Homo sapiens
agaagaatttagcct

SEQ ID NO: 2135296 - DNA, 15 bp, Homo sapiens
gaagaatttagcctt

SEQ ID NO: 2135297 - DNA, 15 bp, Homo sapiens
aagaatttagccttt

SEQ ID NO: 2135298 - DNA, 15 bp, Homo sapiens
agaatttagcctttg

SEQ ID NO: 2135299 - DNA, 15 bp, Homo sapiens
gaatttagcctttgc

SEQ ID NO: 2135300 - DNA, 15 bp, Homo sapiens
aatttagcctttgct

SEQ ID NO: 2135301 - DNA, 15 bp, Homo sapiens
atttagcctttgctt

SEQ ID NO: 2135302 - DNA, 15 bp, Homo sapiens
tttagcctttgcttg

SEQ ID NO: 2135303 - DNA, 15 bp, Homo sapiens
ttagcctttgcttgt

SEQ ID NO: 2135304 - DNA, 15 bp, Homo sapiens
tagcctttgcttgtg

SEQ ID NO: 2135305 - DNA, 15 bp, Homo sapiens
agcctttgcttgtgt

SEQ ID NO: 2135306 - DNA, 15 bp, Homo sapiens
gcctttgcttgtgtg

SEQ ID NO: 2135307 - DNA, 15 bp, Homo sapiens
cctttgcttgtgtgt

SEQ ID NO: 2135308 - DNA, 15 bp, Homo sapiens
ctttgcttgtgtgtt

SEQ ID NO: 2135309 - DNA, 15 bp, Homo sapiens
tttgcttgtgtgttc

SEQ ID NO: 2135310 - DNA, 15 bp, Homo sapiens
ttgcttgtgtgttct

SEQ ID NO: 2135311 - DNA, 15 bp, Homo sapiens
tgcttgtgtgttcta

SEQ ID NO: 2135312 - DNA, 15 bp, Homo sapiens
gcttgtgtgttctat

SEQ ID NO: 2135313 - DNA, 15 bp, Homo sapiens
cttgtgtgttctatg

SEQ ID NO: 2135314 - DNA, 15 bp, Homo sapiens
ttgtgtgttctatgt

SEQ ID NO: 2135315 - DNA, 15 bp, Homo sapiens
tgtgtgttctatgtc

SEQ ID NO: 2135316 - DNA, 15 bp, Homo sapiens
gtgtgttctatgtct

SEQ ID NO: 2135317 - DNA, 15 bp, Homo sapiens
tgtgttctatgtctt

SEQ ID NO: 2135318 - DNA, 15 bp, Homo sapiens
gtgttctatgtcttc

SEQ ID NO: 2135319 - DNA, 15 bp, Homo sapiens
tgttctatgtcttca

SEQ ID NO: 2135320 - DNA, 15 bp, Homo sapiens
gttctatgtcttcac

SEQ ID NO: 2135321 - DNA, 15 bp, Homo sapiens
ttctatgtcttcact

SEQ ID NO: 2135322 - DNA, 15 bp, Homo sapiens
tctatgtcttcactg

SEQ ID NO: 2135323 - DNA, 15 bp, Homo sapiens
ctatgtcttcactgt

SEQ ID NO: 2135324 - DNA, 15 bp, Homo sapiens
tatgtcttcactgta

SEQ ID NO: 2135325 - DNA, 15 bp, Homo sapiens
atgtcttcactgtat

SEQ ID NO: 2135326 - DNA, 15 bp, Homo sapiens
tgtcttcactgtata

SEQ ID NO: 2135327 - DNA, 15 bp, Homo sapiens
gtcttcactgtatag

SEQ ID NO: 2135328 - DNA, 15 bp, Homo sapiens
tcttcactgtatagg

SEQ ID NO: 2135329 - DNA, 15 bp, Homo sapiens
cttcactgtataggc

SEQ ID NO: 2135330 - DNA, 15 bp, Homo sapiens
ttcactgtataggcc

SEQ ID NO: 2135331 - DNA, 15 bp, Homo sapiens
tcactgtataggccc

SEQ ID NO: 2135332 - DNA, 15 bp, Homo sapiens
cactgtataggccct

SEQ ID NO: 2135333 - DNA, 15 bp, Homo sapiens
actgtataggccctc

SEQ ID NO: 2135334 - DNA, 15 bp, Homo sapiens
ctgtataggccctct

SEQ ID NO: 2135335 - DNA, 15 bp, Homo sapiens
tgtataggccctctg

SEQ ID NO: 2135336 - DNA, 15 bp, Homo sapiens
gtataggccctctgt

SEQ ID NO: 2135337 - DNA, 15 bp, Homo sapiens
tataggccctctgtc

SEQ ID NO: 2135338 - DNA, 15 bp, Homo sapiens
ataggccctctgtca

SEQ ID NO: 2135339 - DNA, 15 bp, Homo sapiens
taggccctctgtcat

SEQ ID NO: 2135340 - DNA, 15 bp, Homo sapiens
aggccctctgtcatt

SEQ ID NO: 2135341 - DNA, 15 bp, Homo sapiens
ggccctctgtcattc

SEQ ID NO: 2135342 - DNA, 15 bp, Homo sapiens
gccctctgtcattct

SEQ ID NO: 2135343 - DNA, 15 bp, Homo sapiens
ccctctgtcattctt

SEQ ID NO: 2135344 - DNA, 15 bp, Homo sapiens
cctctgtcattctta

SEQ ID NO: 2135345 - DNA, 15 bp, Homo sapiens
ctctgtcattcttag

SEQ ID NO: 2135346 - DNA, 15 bp, Homo sapiens
tctgtcattcttaga

SEQ ID NO: 2135347 - DNA, 15 bp, Homo sapiens
ctgtcattcttagag

SEQ ID NO: 2135348 - DNA, 15 bp, Homo sapiens
tgtcattcttagagc

SEQ ID NO: 2135349 - DNA, 15 bp, Homo sapiens
gtcattcttagagcc

SEQ ID NO: 2135350 - DNA, 15 bp, Homo sapiens
tcattcttagagcct

SEQ ID NO: 2135351 - DNA, 15 bp, Homo sapiens
cattcttagagcctt

SEQ ID NO: 2135352 - DNA, 15 bp, Homo sapiens
attcttagagcctta

SEQ ID NO: 2135353 - DNA, 15 bp, Homo sapiens
ttcttagagccttaa

SEQ ID NO: 2135354 - DNA, 15 bp, Homo sapiens
tcttagagccttaaa

SEQ ID NO: 2135355 - DNA, 15 bp, Homo sapiens
cttagagccttaaac

SEQ ID NO: 2135356 - DNA, 15 bp, Homo sapiens
ttagagccttaaacg

SEQ ID NO: 2135357 - DNA, 15 bp, Homo sapiens
tagagccttaaacgt

SEQ ID NO: 2135358 - DNA, 15 bp, Homo sapiens
agagccttaaacgtt

SEQ ID NO: 2135359 - DNA, 15 bp, Homo sapiens
gagccttaaacgttg

SEQ ID NO: 2135360 - DNA, 15 bp, Homo sapiens
agccttaaacgttga

SEQ ID NO: 2135361 - DNA, 15 bp, Homo sapiens
gccttaaacgttgag

SEQ ID NO: 2135362 - DNA, 15 bp, Homo sapiens
ccttaaacgttgaga

SEQ ID NO: 2135363 - DNA, 15 bp, Homo sapiens
cttaaacgttgagaa

SEQ ID NO: 2135364 - DNA, 15 bp, Homo sapiens
ttaaacgttgagaag

SEQ ID NO: 2135365 - DNA, 15 bp, Homo sapiens
taaacgttgagaagc

SEQ ID NO: 2135366 - DNA, 15 bp, Homo sapiens
aaacgttgagaagct

SEQ ID NO: 2135367 - DNA, 15 bp, Homo sapiens
aacgttgagaagctt

SEQ ID NO: 2135368 - DNA, 15 bp, Homo sapiens
acgttgagaagctta

SEQ ID NO: 2135369 - DNA, 15 bp, Homo sapiens
cgttgagaagcttaa

SEQ ID NO: 2135370 - DNA, 15 bp, Homo sapiens
gttgagaagcttaaa

SEQ ID NO: 2135371 - DNA, 15 bp, Homo sapiens
ttgagaagcttaaaa

SEQ ID NO: 2135372 - DNA, 15 bp, Homo sapiens
tgagaagcttaaaac

SEQ ID NO: 2135373 - DNA, 15 bp, Homo sapiens
gagaagcttaaaaca

SEQ ID NO: 2135374 - DNA, 15 bp, Homo sapiens
agaagcttaaaacac

SEQ ID NO: 2135375 - DNA, 15 bp, Homo sapiens
gaagcttaaaacacc

SEQ ID NO: 2135376 - DNA, 15 bp, Homo sapiens
aagcttaaaacacca

SEQ ID NO: 2135377 - DNA, 15 bp, Homo sapiens
agcttaaaacaccat

SEQ ID NO: 2135378 - DNA, 15 bp, Homo sapiens
gcttaaaacaccatt

SEQ ID NO: 2135379 - DNA, 15 bp, Homo sapiens
cttaaaacaccattt

SEQ ID NO: 2135380 - DNA, 15 bp, Homo sapiens
ttaaaacaccatttc

SEQ ID NO: 2135381 - DNA, 15 bp, Homo sapiens
taaaacaccatttct

SEQ ID NO: 2135382 - DNA, 15 bp, Homo sapiens
aaaacaccatttctg

SEQ ID NO: 2135383 - DNA, 15 bp, Homo sapiens
aaacaccatttctgc

SEQ ID NO: 2135384 - DNA, 15 bp, Homo sapiens
aacaccatttctgct

SEQ ID NO: 2135385 - DNA, 15 bp, Homo sapiens
acaccatttctgctt

SEQ ID NO: 2135386 - DNA, 15 bp, Homo sapiens
caccatttctgcttt

SEQ ID NO: 2135387 - DNA, 15 bp, Homo sapiens
accatttctgctttc

SEQ ID NO: 2135388 - DNA, 15 bp, Homo sapiens
ccatttctgctttct

SEQ ID NO: 2135389 - DNA, 15 bp, Homo sapiens
catttctgctttctg

SEQ ID NO: 2135390 - DNA, 15 bp, Homo sapiens
atttctgctttctgc

SEQ ID NO: 2135391 - DNA, 15 bp, Homo sapiens
tttctgctttctgct

SEQ ID NO: 2135392 - DNA, 15 bp, Homo sapiens
ttctgctttctgctg

SEQ ID NO: 2135393 - DNA, 15 bp, Homo sapiens
tctgctttctgctga

SEQ ID NO: 2135394 - DNA, 15 bp, Homo sapiens
ctgctttctgctgaa

SEQ ID NO: 2135395 - DNA, 15 bp, Homo sapiens
tgctttctgctgaaa

SEQ ID NO: 2135396 - DNA, 15 bp, Homo sapiens
gctttctgctgaaag

SEQ ID NO: 2135397 - DNA, 15 bp, Homo sapiens
ctttctgctgaaagg

SEQ ID NO: 2135398 - DNA, 15 bp, Homo sapiens
tttctgctgaaaggg

SEQ ID NO: 2135399 - DNA, 15 bp, Homo sapiens
ttctgctgaaagggt

SEQ ID NO: 2135400 - DNA, 15 bp, Homo sapiens
tctgctgaaagggta

SEQ ID NO: 2135401 - DNA, 15 bp, Homo sapiens
ctgctgaaagggtaa

SEQ ID NO: 2135402 - DNA, 15 bp, Homo sapiens
tgctgaaagggtaac

SEQ ID NO: 2135403 - DNA, 15 bp, Homo sapiens
gctgaaagggtaacc

SEQ ID NO: 2135404 - DNA, 15 bp, Homo sapiens
ctgaaagggtaaccc

SEQ ID NO: 2135405 - DNA, 15 bp, Homo sapiens
tgaaagggtaaccct

SEQ ID NO: 2135406 - DNA, 15 bp, Homo sapiens
gaaagggtaaccctt

SEQ ID NO: 2135407 - DNA, 15 bp, Homo sapiens
aaagggtaacccttt

SEQ ID NO: 2135408 - DNA, 15 bp, Homo sapiens
aagggtaaccctttc

SEQ ID NO: 2135409 - DNA, 15 bp, Homo sapiens
agggtaaccctttct

SEQ ID NO: 2135410 - DNA, 15 bp, Homo sapiens
gggtaaccctttctc

SEQ ID NO: 2135411 - DNA, 15 bp, Homo sapiens
ggtaaccctttctca

SEQ ID NO: 2135412 - DNA, 15 bp, Homo sapiens
gtaaccctttctcat

SEQ ID NO: 2135413 - DNA, 15 bp, Homo sapiens
taaccctttctcatc

SEQ ID NO: 2135414 - DNA, 15 bp, Homo sapiens
aaccctttctcatct

SEQ ID NO: 2135415 - DNA, 15 bp, Homo sapiens
accctttctcatctc

SEQ ID NO: 2135416 - DNA, 15 bp, Homo sapiens
ccctttctcatctcc

SEQ ID NO: 2135417 - DNA, 15 bp, Homo sapiens
cctttctcatctccg

SEQ ID NO: 2135418 - DNA, 15 bp, Homo sapiens
ctttctcatctccgt

SEQ ID NO: 2135419 - DNA, 15 bp, Homo sapiens
tttctcatctccgtt

SEQ ID NO: 2135420 - DNA, 15 bp, Homo sapiens
ttctcatctccgttt

SEQ ID NO: 2135421 - DNA, 15 bp, Homo sapiens
tctcatctccgtttg

SEQ ID NO: 2135422 - DNA, 15 bp, Homo sapiens
ctcatctccgtttgt

SEQ ID NO: 2135423 - DNA, 15 bp, Homo sapiens
tcatctccgtttgtg

SEQ ID NO: 2135424 - DNA, 15 bp, Homo sapiens
catctccgtttgtga

SEQ ID NO: 2135425 - DNA, 15 bp, Homo sapiens
atctccgtttgtgag

SEQ ID NO: 2135426 - DNA, 15 bp, Homo sapiens
tctccgtttgtgaga

SEQ ID NO: 2135427 - DNA, 15 bp, Homo sapiens
ctccgtttgtgagag

SEQ ID NO: 2135428 - DNA, 15 bp, Homo sapiens
tccgtttgtgagaga

SEQ ID NO: 2135429 - DNA, 15 bp, Homo sapiens
ccgtttgtgagagac

SEQ ID NO: 2135430 - DNA, 15 bp, Homo sapiens
cgtttgtgagagact

SEQ ID NO: 2135431 - DNA, 15 bp, Homo sapiens
gtttgtgagagactc

SEQ ID NO: 2135432 - DNA, 15 bp, Homo sapiens
tttgtgagagactct

SEQ ID NO: 2135433 - DNA, 15 bp, Homo sapiens
ttgtgagagactctg

SEQ ID NO: 2135434 - DNA, 15 bp, Homo sapiens
tgtgagagactctgt

SEQ ID NO: 2135435 - DNA, 15 bp, Homo sapiens
gtgagagactctgtc

SEQ ID NO: 2135436 - DNA, 15 bp, Homo sapiens
tgagagactctgtcg

SEQ ID NO: 2135437 - DNA, 15 bp, Homo sapiens
gagagactctgtcgt

SEQ ID NO: 2135438 - DNA, 15 bp, Homo sapiens
agagactctgtcgtc

SEQ ID NO: 2135439 - DNA, 15 bp, Homo sapiens
gagactctgtcgtca

SEQ ID NO: 2135440 - DNA, 15 bp, Homo sapiens
agactctgtcgtcag

SEQ ID NO: 2135441 - DNA, 15 bp, Homo sapiens
gactctgtcgtcagt

SEQ ID NO: 2135442 - DNA, 15 bp, Homo sapiens
actctgtcgtcagtt

SEQ ID NO: 2135443 - DNA, 15 bp, Homo sapiens
ctctgtcgtcagtta

SEQ ID NO: 2135444 - DNA, 15 bp, Homo sapiens
tctgtcgtcagttaa

SEQ ID NO: 2135445 - DNA, 15 bp, Homo sapiens
ctgtcgtcagttaag

SEQ ID NO: 2135446 - DNA, 15 bp, Homo sapiens
tgtcgtcagttaaga

SEQ ID NO: 2135447 - DNA, 15 bp, Homo sapiens
gtcgtcagttaagat

SEQ ID NO: 2135448 - DNA, 15 bp, Homo sapiens
tcgtcagttaagatt

SEQ ID NO: 2135449 - DNA, 15 bp, Homo sapiens
cgtcagttaagatta

SEQ ID NO: 2135450 - DNA, 15 bp, Homo sapiens
gtcagttaagattag

SEQ ID NO: 2135451 - DNA, 15 bp, Homo sapiens
tcagttaagattagt

SEQ ID NO: 2135452 - DNA, 15 bp, Homo sapiens
cagttaagattagtg

SEQ ID NO: 2135453 - DNA, 15 bp, Homo sapiens
agttaagattagtgt

SEQ ID NO: 2135454 - DNA, 15 bp, Homo sapiens
gttaagattagtgta

SEQ ID NO: 2135455 - DNA, 15 bp, Homo sapiens
ttaagattagtgtaa

SEQ ID NO: 2135456 - DNA, 15 bp, Homo sapiens
taagattagtgtaaa

SEQ ID NO: 2135457 - DNA, 15 bp, Homo sapiens
aagattagtgtaaaa

SEQ ID NO: 2135458 - DNA, 15 bp, Homo sapiens
agattagtgtaaaaa

SEQ ID NO: 2135459 - DNA, 15 bp, Homo sapiens
gattagtgtaaaaag

SEQ ID NO: 2135460 - DNA, 15 bp, Homo sapiens
attagtgtaaaaaga

SEQ ID NO: 2135461 - DNA, 15 bp, Homo sapiens
ttagtgtaaaaagaa

SEQ ID NO: 2135462 - DNA, 15 bp, Homo sapiens
tagtgtaaaaagaaa

SEQ ID NO: 2135463 - DNA, 15 bp, Homo sapiens
agtgtaaaaagaaaa

SEQ ID NO: 2135464 - DNA, 15 bp, Homo sapiens
gtgtaaaaagaaaac

SEQ ID NO: 2135465 - DNA, 15 bp, Homo sapiens
tgtaaaaagaaaact

SEQ ID NO: 2135466 - DNA, 15 bp, Homo sapiens
gtaaaaagaaaacta

SEQ ID NO: 2135467 - DNA, 15 bp, Homo sapiens
taaaaagaaaactaa

SEQ ID NO: 2135468 - DNA, 15 bp, Homo sapiens
aaaaagaaaactaaa

SEQ ID NO: 2135469 - DNA, 15 bp, Homo sapiens
aaaagaaaactaaac

SEQ ID NO: 2135470 - DNA, 15 bp, Homo sapiens
aaagaaaactaaact

SEQ ID NO: 2135471 - DNA, 15 bp, Homo sapiens
aagaaaactaaactc

SEQ ID NO: 2135472 - DNA, 15 bp, Homo sapiens
agaaaactaaactct

SEQ ID NO: 2135473 - DNA, 15 bp, Homo sapiens
gaaaactaaactctg

SEQ ID NO: 2135474 - DNA, 15 bp, Homo sapiens
aaaactaaactctga

SEQ ID NO: 2135475 - DNA, 15 bp, Homo sapiens
aaactaaactctgaa

SEQ ID NO: 2135476 - DNA, 15 bp, Homo sapiens
aactaaactctgaag

SEQ ID NO: 2135477 - DNA, 15 bp, Homo sapiens
actaaactctgaagt

SEQ ID NO: 2135478 - DNA, 15 bp, Homo sapiens
ctaaactctgaagta

SEQ ID NO: 2135479 - DNA, 15 bp, Homo sapiens
taaactctgaagtag

SEQ ID NO: 2135480 - DNA, 15 bp, Homo sapiens
aaactctgaagtagc

SEQ ID NO: 2135481 - DNA, 15 bp, Homo sapiens
aactctgaagtagcc

SEQ ID NO: 2135482 - DNA, 15 bp, Homo sapiens
actctgaagtagcca

SEQ ID NO: 2135483 - DNA, 15 bp, Homo sapiens
ctctgaagtagccat

SEQ ID NO: 2135484 - DNA, 15 bp, Homo sapiens
tctgaagtagccatt

SEQ ID NO: 2135485 - DNA, 15 bp, Homo sapiens
ctgaagtagccatta

SEQ ID NO: 2135486 - DNA, 15 bp, Homo sapiens
tgaagtagccattat

SEQ ID NO: 2135487 - DNA, 15 bp, Homo sapiens
gaagtagccattata

SEQ ID NO: 2135488 - DNA, 15 bp, Homo sapiens
aagtagccattataa

SEQ ID NO: 2135489 - DNA, 15 bp, Homo sapiens
agtagccattataaa

SEQ ID NO: 2135490 - DNA, 15 bp, Homo sapiens
gtagccattataaaa

SEQ ID NO: 2135491 - DNA, 15 bp, Homo sapiens
tagccattataaaag

SEQ ID NO: 2135492 - DNA, 15 bp, Homo sapiens
agccattataaaagt

SEQ ID NO: 2135493 - DNA, 15 bp, Homo sapiens
gccattataaaagtg

SEQ ID NO: 2135494 - DNA, 15 bp, Homo sapiens
ccattataaaagtgt

SEQ ID NO: 2135495 - DNA, 15 bp, Homo sapiens
cattataaaagtgtg

SEQ ID NO: 2135496 - DNA, 15 bp, Homo sapiens
attataaaagtgtga

SEQ ID NO: 2135497 - DNA, 15 bp, Homo sapiens
tataaaagtgtgaga

SEQ ID NO: 2135498 - DNA, 15 bp, Homo sapiens
ataaaagtgtgagaa

SEQ ID NO: 2135499 - DNA, 15 bp, Homo sapiens
taaaagtgtgagaat

SEQ ID NO: 2135500 - DNA, 15 bp, Homo sapiens
aaaagtgtgagaatg

SEQ ID NO: 2135501 - DNA, 15 bp, Homo sapiens
aaagtgtgagaatga

SEQ ID NO: 2135502 - DNA, 15 bp, Homo sapiens
aagtgtgagaatgaa

SEQ ID NO: 2135503 - DNA, 15 bp, Homo sapiens
agtgtgagaatgaag

SEQ ID NO: 2135504 - DNA, 15 bp, Homo sapiens
gtgtgagaatgaagt

SEQ ID NO: 2135505 - DNA, 15 bp, Homo sapiens
tgtgagaatgaagtc

SEQ ID NO: 2135506 - DNA, 15 bp, Homo sapiens
gtgagaatgaagtca

SEQ ID NO: 2135507 - DNA, 15 bp, Homo sapiens
tgagaatgaagtcag

SEQ ID NO: 2135508 - DNA, 15 bp, Homo sapiens
gagaatgaagtcagt

SEQ ID NO: 2135509 - DNA, 15 bp, Homo sapiens
agaatgaagtcagtt

SEQ ID NO: 2135510 - DNA, 15 bp, Homo sapiens
gaatgaagtcagttt

SEQ ID NO: 2135511 - DNA, 15 bp, Homo sapiens
aatgaagtcagtttt

SEQ ID NO: 2135512 - DNA, 15 bp, Homo sapiens
atgaagtcagttttc

SEQ ID NO: 2135513 - DNA, 15 bp, Homo sapiens
tgaagtcagttttct

SEQ ID NO: 2135514 - DNA, 15 bp, Homo sapiens
gaagtcagttttcta

SEQ ID NO: 2135515 - DNA, 15 bp, Homo sapiens
aagtcagttttctaa

SEQ ID NO: 2135516 - DNA, 15 bp, Homo sapiens
agtcagttttctaaa

SEQ ID NO: 2135517 - DNA, 15 bp, Homo sapiens
gtcagttttctaaag

SEQ ID NO: 2135518 - DNA, 15 bp, Homo sapiens
tcagttttctaaaga

SEQ ID NO: 2135519 - DNA, 15 bp, Homo sapiens
cagttttctaaagag

SEQ ID NO: 2135520 - DNA, 15 bp, Homo sapiens
agttttctaaagagt

SEQ ID NO: 2135521 - DNA, 15 bp, Homo sapiens
gttttctaaagagtt

SEQ ID NO: 2135522 - DNA, 15 bp, Homo sapiens
ttttctaaagagttg

SEQ ID NO: 2135523 - DNA, 15 bp, Homo sapiens
tttctaaagagttgg

SEQ ID NO: 2135524 - DNA, 15 bp, Homo sapiens
ttctaaagagttggg

SEQ ID NO: 2135525 - DNA, 15 bp, Homo sapiens
tctaaagagttgggg

SEQ ID NO: 2135526 - DNA, 15 bp, Homo sapiens
ctaaagagttgggga

SEQ ID NO: 2135527 - DNA, 15 bp, Homo sapiens
taaagagttggggaa

SEQ ID NO: 2135528 - DNA, 15 bp, Homo sapiens
aaagagttggggaaa

SEQ ID NO: 2135529 - DNA, 15 bp, Homo sapiens
aagagttggggaaag

SEQ ID NO: 2135530 - DNA, 15 bp, Homo sapiens
agagttggggaaagg

SEQ ID NO: 2135531 - DNA, 15 bp, Homo sapiens
gagttggggaaaggt

SEQ ID NO: 2135532 - DNA, 15 bp, Homo sapiens
agttggggaaaggtg

SEQ ID NO: 2135533 - DNA, 15 bp, Homo sapiens
gttggggaaaggtga

SEQ ID NO: 2135534 - DNA, 15 bp, Homo sapiens
ttggggaaaggtgat

SEQ ID NO: 2135535 - DNA, 15 bp, Homo sapiens
tggggaaaggtgatg

SEQ ID NO: 2135536 - DNA, 15 bp, Homo sapiens
ggggaaaggtgatgc

SEQ ID NO: 2135537 - DNA, 15 bp, Homo sapiens
gggaaaggtgatgct

SEQ ID NO: 2135538 - DNA, 15 bp, Homo sapiens
ggaaaggtgatgcta

SEQ ID NO: 2135539 - DNA, 15 bp, Homo sapiens
gaaaggtgatgctaa

SEQ ID NO: 2135540 - DNA, 15 bp, Homo sapiens
aaaggtgatgctaaa

SEQ ID NO: 2135541 - DNA, 15 bp, Homo sapiens
aaggtgatgctaaag

SEQ ID NO: 2135542 - DNA, 15 bp, Homo sapiens
aggtgatgctaaagg

SEQ ID NO: 2135543 - DNA, 15 bp, Homo sapiens
ggtgatgctaaagga

SEQ ID NO: 2135544 - DNA, 15 bp, Homo sapiens
gtgatgctaaaggag

SEQ ID NO: 2135545 - DNA, 15 bp, Homo sapiens
tgatgctaaaggagg

SEQ ID NO: 2135546 - DNA, 15 bp, Homo sapiens
gatgctaaaggaggg

SEQ ID NO: 2135547 - DNA, 15 bp, Homo sapiens
atgctaaaggagggg

SEQ ID NO: 2135548 - DNA, 15 bp, Homo sapiens
tgctaaaggagggga

SEQ ID NO: 2135549 - DNA, 15 bp, Homo sapiens
gctaaaggaggggat

SEQ ID NO: 2135550 - DNA, 15 bp, Homo sapiens
ctaaaggaggggatt

SEQ ID NO: 2135551 - DNA, 15 bp, Homo sapiens
taaaggaggggattg

SEQ ID NO: 2135552 - DNA, 15 bp, Homo sapiens
aaaggaggggattga

SEQ ID NO: 2135553 - DNA, 15 bp, Homo sapiens
aaggaggggattgag

SEQ ID NO: 2135554 - DNA, 15 bp, Homo sapiens
aggaggggattgagc

SEQ ID NO: 2135555 - DNA, 15 bp, Homo sapiens
ggaggggattgagca

SEQ ID NO: 2135556 - DNA, 15 bp, Homo sapiens
gaggggattgagcaa

SEQ ID NO: 2135557 - DNA, 15 bp, Homo sapiens
aggggattgagcaag

SEQ ID NO: 2135558 - DNA, 15 bp, Homo sapiens
ggggattgagcaagt

SEQ ID NO: 2135559 - DNA, 15 bp, Homo sapiens
gggattgagcaagtc

SEQ ID NO: 2135560 - DNA, 15 bp, Homo sapiens
ggattgagcaagtcc

SEQ ID NO: 2135561 - DNA, 15 bp, Homo sapiens
gattgagcaagtcct

SEQ ID NO: 2135562 - DNA, 15 bp, Homo sapiens
attgagcaagtccta

SEQ ID NO: 2135563 - DNA, 15 bp, Homo sapiens
ttgagcaagtcctat

SEQ ID NO: 2135564 - DNA, 15 bp, Homo sapiens
tgagcaagtcctatc

SEQ ID NO: 2135565 - DNA, 15 bp, Homo sapiens
gagcaagtcctatca

SEQ ID NO: 2135566 - DNA, 15 bp, Homo sapiens
agcaagtcctatcaa

SEQ ID NO: 2135567 - DNA, 15 bp, Homo sapiens
gcaagtcctatcaaa

SEQ ID NO: 2135568 - DNA, 15 bp, Homo sapiens
caagtcctatcaaag

SEQ ID NO: 2135569 - DNA, 15 bp, Homo sapiens
aagtcctatcaaaga

SEQ ID NO: 2135570 - DNA, 15 bp, Homo sapiens
agtcctatcaaagag

SEQ ID NO: 2135571 - DNA, 15 bp, Homo sapiens
gtcctatcaaagagc

SEQ ID NO: 2135572 - DNA, 15 bp, Homo sapiens
tcctatcaaagagcc

SEQ ID NO: 2135573 - DNA, 15 bp, Homo sapiens
cctatcaaagagcct

SEQ ID NO: 2135574 - DNA, 15 bp, Homo sapiens
ctatcaaagagcctt

SEQ ID NO: 2135575 - DNA, 15 bp, Homo sapiens
tatcaaagagccttt

SEQ ID NO: 2135576 - DNA, 15 bp, Homo sapiens
atcaaagagcctttt

SEQ ID NO: 2135577 - DNA, 15 bp, Homo sapiens
tcaaagagcctttta

SEQ ID NO: 2135578 - DNA, 15 bp, Homo sapiens
caaagagccttttat

SEQ ID NO: 2135579 - DNA, 15 bp, Homo sapiens
aaagagccttttatg

SEQ ID NO: 2135580 - DNA, 15 bp, Homo sapiens
aagagccttttatga

SEQ ID NO: 2135581 - DNA, 15 bp, Homo sapiens
agagccttttatgaa

SEQ ID NO: 2135582 - DNA, 15 bp, Homo sapiens
gagccttttatgaaa

SEQ ID NO: 2135583 - DNA, 15 bp, Homo sapiens
agccttttatgaaaa

SEQ ID NO: 2135584 - DNA, 15 bp, Homo sapiens
gccttttatgaaaat

SEQ ID NO: 2135585 - DNA, 15 bp, Homo sapiens
ccttttatgaaaata

SEQ ID NO: 2135586 - DNA, 15 bp, Homo sapiens
cttttatgaaaatac

SEQ ID NO: 2135587 - DNA, 15 bp, Homo sapiens
ttttatgaaaatact

SEQ ID NO: 2135588 - DNA, 15 bp, Homo sapiens
tttatgaaaatactt

SEQ ID NO: 2135589 - DNA, 15 bp, Homo sapiens
ttatgaaaatactta

SEQ ID NO: 2135590 - DNA, 15 bp, Homo sapiens
tatgaaaatacttag

SEQ ID NO: 2135591 - DNA, 15 bp, Homo sapiens
atgaaaatacttagt

SEQ ID NO: 2135592 - DNA, 15 bp, Homo sapiens
tgaaaatacttagtc

SEQ ID NO: 2135593 - DNA, 15 bp, Homo sapiens
gaaaatacttagtca

SEQ ID NO: 2135594 - DNA, 15 bp, Homo sapiens
aaaatacttagtcat

SEQ ID NO: 2135595 - DNA, 15 bp, Homo sapiens
aaatacttagtcatc

SEQ ID NO: 2135596 - DNA, 15 bp, Homo sapiens
aatacttagtcatct

SEQ ID NO: 2135597 - DNA, 15 bp, Homo sapiens
atacttagtcatctg

SEQ ID NO: 2135598 - DNA, 15 bp, Homo sapiens
tacttagtcatctgt

SEQ ID NO: 2135599 - DNA, 15 bp, Homo sapiens
acttagtcatctgtg

SEQ ID NO: 2135600 - DNA, 15 bp, Homo sapiens
cttagtcatctgtga

SEQ ID NO: 2135601 - DNA, 15 bp, Homo sapiens
ttagtcatctgtgac

SEQ ID NO: 2135602 - DNA, 15 bp, Homo sapiens
tagtcatctgtgaca

SEQ ID NO: 2135603 - DNA, 15 bp, Homo sapiens
agtcatctgtgacat

SEQ ID NO: 2135604 - DNA, 15 bp, Homo sapiens
gtcatctgtgacatc

SEQ ID NO: 2135605 - DNA, 15 bp, Homo sapiens
tcatctgtgacatcc

SEQ ID NO: 2135606 - DNA, 15 bp, Homo sapiens
catctgtgacatccc

SEQ ID NO: 2135607 - DNA, 15 bp, Homo sapiens
atctgtgacatccca

SEQ ID NO: 2135608 - DNA, 15 bp, Homo sapiens
tctgtgacatcccat

SEQ ID NO: 2135609 - DNA, 15 bp, Homo sapiens
ctgtgacatcccatt

SEQ ID NO: 2135610 - DNA, 15 bp, Homo sapiens
tgtgacatcccattt

SEQ ID NO: 2135611 - DNA, 15 bp, Homo sapiens
gtgacatcccatttg

SEQ ID NO: 2135612 - DNA, 15 bp, Homo sapiens
tgacatcccatttgg

SEQ ID NO: 2135613 - DNA, 15 bp, Homo sapiens
gacatcccatttggc

SEQ ID NO: 2135614 - DNA, 15 bp, Homo sapiens
acatcccatttggct

SEQ ID NO: 2135615 - DNA, 15 bp, Homo sapiens
catcccatttggctc

SEQ ID NO: 2135616 - DNA, 15 bp, Homo sapiens
atcccatttggctct

SEQ ID NO: 2135617 - DNA, 15 bp, Homo sapiens
tcccatttggctctt

SEQ ID NO: 2135618 - DNA, 15 bp, Homo sapiens
cccatttggctcttc

SEQ ID NO: 2135619 - DNA, 15 bp, Homo sapiens
ccatttggctcttcc

SEQ ID NO: 2135620 - DNA, 15 bp, Homo sapiens
catttggctcttcca

SEQ ID NO: 2135621 - DNA, 15 bp, Homo sapiens
atttggctcttccag

SEQ ID NO: 2135622 - DNA, 15 bp, Homo sapiens
tttggctcttccaga

SEQ ID NO: 2135623 - DNA, 15 bp, Homo sapiens
ttggctcttccagaa

SEQ ID NO: 2135624 - DNA, 15 bp, Homo sapiens
tggctcttccagaaa

SEQ ID NO: 2135625 - DNA, 15 bp, Homo sapiens
ggctcttccagaaat

SEQ ID NO: 2135626 - DNA, 15 bp, Homo sapiens
gctcttccagaaatc

SEQ ID NO: 2135627 - DNA, 15 bp, Homo sapiens
ctcttccagaaatcc

SEQ ID NO: 2135628 - DNA, 15 bp, Homo sapiens
tcttccagaaatcct

SEQ ID NO: 2135629 - DNA, 15 bp, Homo sapiens
cttccagaaatccta

SEQ ID NO: 2135630 - DNA, 15 bp, Homo sapiens
ttccagaaatcctag

SEQ ID NO: 2135631 - DNA, 15 bp, Homo sapiens
tccagaaatcctagt

SEQ ID NO: 2135632 - DNA, 15 bp, Homo sapiens
ccagaaatcctagta

SEQ ID NO: 2135633 - DNA, 15 bp, Homo sapiens
cagaaatcctagtaa

SEQ ID NO: 2135634 - DNA, 15 bp, Homo sapiens
agaaatcctagtaaa

SEQ ID NO: 2135635 - DNA, 15 bp, Homo sapiens
gaaatcctagtaaat

SEQ ID NO: 2135636 - DNA, 15 bp, Homo sapiens
aaatcctagtaaata

SEQ ID NO: 2135637 - DNA, 15 bp, Homo sapiens
aatcctagtaaatag

SEQ ID NO: 2135638 - DNA, 15 bp, Homo sapiens
atcctagtaaatagt

SEQ ID NO: 2135639 - DNA, 15 bp, Homo sapiens
tcctagtaaatagtt

SEQ ID NO: 2135640 - DNA, 15 bp, Homo sapiens
cctagtaaatagttg

SEQ ID NO: 2135641 - DNA, 15 bp, Homo sapiens
ctagtaaatagttgt

SEQ ID NO: 2135642 - DNA, 15 bp, Homo sapiens
tagtaaatagttgta

SEQ ID NO: 2135643 - DNA, 15 bp, Homo sapiens
agtaaatagttgtaa

SEQ ID NO: 2135644 - DNA, 15 bp, Homo sapiens
gtaaatagttgtaac

SEQ ID NO: 2135645 - DNA, 15 bp, Homo sapiens
taaatagttgtaaca

SEQ ID NO: 2135646 - DNA, 15 bp, Homo sapiens
aaatagttgtaacag

SEQ ID NO: 2135647 - DNA, 15 bp, Homo sapiens
aatagttgtaacagg

SEQ ID NO: 2135648 - DNA, 15 bp, Homo sapiens
atagttgtaacagga

SEQ ID NO: 2135649 - DNA, 15 bp, Homo sapiens
tagttgtaacaggat

SEQ ID NO: 2135650 - DNA, 15 bp, Homo sapiens
agttgtaacaggatg

SEQ ID NO: 2135651 - DNA, 15 bp, Homo sapiens
gttgtaacaggatgt

SEQ ID NO: 2135652 - DNA, 15 bp, Homo sapiens
ttgtaacaggatgtt

SEQ ID NO: 2135653 - DNA, 15 bp, Homo sapiens
tgtaacaggatgtta

SEQ ID NO: 2135654 - DNA, 15 bp, Homo sapiens
gtaacaggatgttaa

SEQ ID NO: 2135655 - DNA, 15 bp, Homo sapiens
taacaggatgttaag

SEQ ID NO: 2135656 - DNA, 15 bp, Homo sapiens
aacaggatgttaaga

SEQ ID NO: 2135657 - DNA, 15 bp, Homo sapiens
acaggatgttaagag

SEQ ID NO: 2135658 - DNA, 15 bp, Homo sapiens
caggatgttaagagg

SEQ ID NO: 2135659 - DNA, 15 bp, Homo sapiens
aggatgttaagaggc

SEQ ID NO: 2135660 - DNA, 15 bp, Homo sapiens
ggatgttaagaggca

SEQ ID NO: 2135661 - DNA, 15 bp, Homo sapiens
gatgttaagaggcat

SEQ ID NO: 2135662 - DNA, 15 bp, Homo sapiens
atgttaagaggcata

SEQ ID NO: 2135663 - DNA, 15 bp, Homo sapiens
tgttaagaggcatac

SEQ ID NO: 2135664 - DNA, 15 bp, Homo sapiens
gttaagaggcataca

SEQ ID NO: 2135665 - DNA, 15 bp, Homo sapiens
ttaagaggcatacat

SEQ ID NO: 2135666 - DNA, 15 bp, Homo sapiens
taagaggcatacatt

SEQ ID NO: 2135667 - DNA, 15 bp, Homo sapiens
aagaggcatacattg

SEQ ID NO: 2135668 - DNA, 15 bp, Homo sapiens
agaggcatacattgt

SEQ ID NO: 2135669 - DNA, 15 bp, Homo sapiens
gaggcatacattgtg

SEQ ID NO: 2135670 - DNA, 15 bp, Homo sapiens
aggcatacattgtgt

SEQ ID NO: 2135671 - DNA, 15 bp, Homo sapiens
ggcatacattgtgtg

SEQ ID NO: 2135672 - DNA, 15 bp, Homo sapiens
gcatacattgtgtgt

SEQ ID NO: 2135673 - DNA, 15 bp, Homo sapiens
catacattgtgtgtt

SEQ ID NO: 2135674 - DNA, 15 bp, Homo sapiens
atacattgtgtgttt

SEQ ID NO: 2135675 - DNA, 15 bp, Homo sapiens
tacattgtgtgtttt

SEQ ID NO: 2135676 - DNA, 15 bp, Homo sapiens
acattgtgtgtttta

SEQ ID NO: 2135677 - DNA, 15 bp, Homo sapiens
cattgtgtgttttaa

SEQ ID NO: 2135678 - DNA, 15 bp, Homo sapiens
attgtgtgttttaaa

SEQ ID NO: 2135679 - DNA, 15 bp, Homo sapiens
ttgtgtgttttaaat

SEQ ID NO: 2135680 - DNA, 15 bp, Homo sapiens
tgtgtgttttaaatc

SEQ ID NO: 2135681 - DNA, 15 bp, Homo sapiens
gtgtgttttaaatcc

SEQ ID NO: 2135682 - DNA, 15 bp, Homo sapiens
tgtgttttaaatcct

SEQ ID NO: 2135683 - DNA, 15 bp, Homo sapiens
gtgttttaaatcctc

SEQ ID NO: 2135684 - DNA, 15 bp, Homo sapiens
tgttttaaatcctct

SEQ ID NO: 2135685 - DNA, 15 bp, Homo sapiens
gttttaaatcctctg

SEQ ID NO: 2135686 - DNA, 15 bp, Homo sapiens
ttttaaatcctctgc

SEQ ID NO: 2135687 - DNA, 15 bp, Homo sapiens
tttaaatcctctgct

SEQ ID NO: 2135688 - DNA, 15 bp, Homo sapiens
ttaaatcctctgcta

SEQ ID NO: 2135689 - DNA, 15 bp, Homo sapiens
taaatcctctgctac

SEQ ID NO: 2135690 - DNA, 15 bp, Homo sapiens
aaatcctctgctact

SEQ ID NO: 2135691 - DNA, 15 bp, Homo sapiens
aatcctctgctactc

SEQ ID NO: 2135692 - DNA, 15 bp, Homo sapiens
atcctctgctactca

SEQ ID NO: 2135693 - DNA, 15 bp, Homo sapiens
tcctctgctactcat

SEQ ID NO: 2135694 - DNA, 15 bp, Homo sapiens
cctctgctactcatt

SEQ ID NO: 2135695 - DNA, 15 bp, Homo sapiens
ctctgctactcatta

SEQ ID NO: 2135696 - DNA, 15 bp, Homo sapiens
tctgctactcattag

SEQ ID NO: 2135697 - DNA, 15 bp, Homo sapiens
ctgctactcattagg

SEQ ID NO: 2135698 - DNA, 15 bp, Homo sapiens
tgctactcattaggt

SEQ ID NO: 2135699 - DNA, 15 bp, Homo sapiens
gctactcattaggta

SEQ ID NO: 2135700 - DNA, 15 bp, Homo sapiens
ctactcattaggtat

SEQ ID NO: 2135701 - DNA, 15 bp, Homo sapiens
tactcattaggtata

SEQ ID NO: 2135702 - DNA, 15 bp, Homo sapiens
actcattaggtatat

SEQ ID NO: 2135703 - DNA, 15 bp, Homo sapiens
ctcattaggtatatg

SEQ ID NO: 2135704 - DNA, 15 bp, Homo sapiens
tcattaggtatatga

SEQ ID NO: 2135705 - DNA, 15 bp, Homo sapiens
cattaggtatatgac

SEQ ID NO: 2135706 - DNA, 15 bp, Homo sapiens
attaggtatatgacc

SEQ ID NO: 2135707 - DNA, 15 bp, Homo sapiens
ttaggtatatgacct

SEQ ID NO: 2135708 - DNA, 15 bp, Homo sapiens
taggtatatgacctt

SEQ ID NO: 2135709 - DNA, 15 bp, Homo sapiens
aggtatatgaccttt

SEQ ID NO: 2135710 - DNA, 15 bp, Homo sapiens
ggtatatgacctttg

SEQ ID NO: 2135711 - DNA, 15 bp, Homo sapiens
gtatatgacctttga

SEQ ID NO: 2135712 - DNA, 15 bp, Homo sapiens
tatatgacctttgac

SEQ ID NO: 2135713 - DNA, 15 bp, Homo sapiens
atatgacctttgaca

SEQ ID NO: 2135714 - DNA, 15 bp, Homo sapiens
tatgacctttgacaa

SEQ ID NO: 2135715 - DNA, 15 bp, Homo sapiens
atgacctttgacaac

SEQ ID NO: 2135716 - DNA, 15 bp, Homo sapiens
tgacctttgacaact

SEQ ID NO: 2135717 - DNA, 15 bp, Homo sapiens
gacctttgacaactt

SEQ ID NO: 2135718 - DNA, 15 bp, Homo sapiens
acctttgacaactta

SEQ ID NO: 2135719 - DNA, 15 bp, Homo sapiens
cctttgacaacttaa

SEQ ID NO: 2135720 - DNA, 15 bp, Homo sapiens
ctttgacaacttaaa

SEQ ID NO: 2135721 - DNA, 15 bp, Homo sapiens
tttgacaacttaaag

SEQ ID NO: 2135722 - DNA, 15 bp, Homo sapiens
ttgacaacttaaagt

SEQ ID NO: 2135723 - DNA, 15 bp, Homo sapiens
tgacaacttaaagtc

SEQ ID NO: 2135724 - DNA, 15 bp, Homo sapiens
gacaacttaaagtct

SEQ ID NO: 2135725 - DNA, 15 bp, Homo sapiens
acaacttaaagtctc

SEQ ID NO: 2135726 - DNA, 15 bp, Homo sapiens
caacttaaagtctct

SEQ ID NO: 2135727 - DNA, 15 bp, Homo sapiens
aacttaaagtctcta

SEQ ID NO: 2135728 - DNA, 15 bp, Homo sapiens
acttaaagtctctag

SEQ ID NO: 2135729 - DNA, 15 bp, Homo sapiens
cttaaagtctctaga

SEQ ID NO: 2135730 - DNA, 15 bp, Homo sapiens
ttaaagtctctagac

SEQ ID NO: 2135731 - DNA, 15 bp, Homo sapiens
taaagtctctagact

SEQ ID NO: 2135732 - DNA, 15 bp, Homo sapiens
aaagtctctagactt

SEQ ID NO: 2135733 - DNA, 15 bp, Homo sapiens
aagtctctagacttc

SEQ ID NO: 2135734 - DNA, 15 bp, Homo sapiens
agtctctagacttct

SEQ ID NO: 2135735 - DNA, 15 bp, Homo sapiens
gtctctagacttctc

SEQ ID NO: 2135736 - DNA, 15 bp, Homo sapiens
tctctagacttctct

SEQ ID NO: 2135737 - DNA, 15 bp, Homo sapiens
ctctagacttctctg

SEQ ID NO: 2135738 - DNA, 15 bp, Homo sapiens
tctagacttctctgt

SEQ ID NO: 2135739 - DNA, 15 bp, Homo sapiens
ctagacttctctgtt

SEQ ID NO: 2135740 - DNA, 15 bp, Homo sapiens
tagacttctctgttt

SEQ ID NO: 2135741 - DNA, 15 bp, Homo sapiens
agacttctctgtttg

SEQ ID NO: 2135742 - DNA, 15 bp, Homo sapiens
gacttctctgtttgt

SEQ ID NO: 2135743 - DNA, 15 bp, Homo sapiens
acttctctgtttgtg

SEQ ID NO: 2135744 - DNA, 15 bp, Homo sapiens
cttctctgtttgtga

SEQ ID NO: 2135745 - DNA, 15 bp, Homo sapiens
ttctctgtttgtgag

SEQ ID NO: 2135746 - DNA, 15 bp, Homo sapiens
tctctgtttgtgagg

SEQ ID NO: 2135747 - DNA, 15 bp, Homo sapiens
ctctgtttgtgaggg

SEQ ID NO: 2135748 - DNA, 15 bp, Homo sapiens
tctgtttgtgagggt

SEQ ID NO: 2135749 - DNA, 15 bp, Homo sapiens
ctgtttgtgagggtt

SEQ ID NO: 2135750 - DNA, 15 bp, Homo sapiens
tgtttgtgagggtta

SEQ ID NO: 2135751 - DNA, 15 bp, Homo sapiens
gtttgtgagggttaa

SEQ ID NO: 2135752 - DNA, 15 bp, Homo sapiens
tttgtgagggttaaa

SEQ ID NO: 2135753 - DNA, 15 bp, Homo sapiens
ttgtgagggttaaat

SEQ ID NO: 2135754 - DNA, 15 bp, Homo sapiens
tgtgagggttaaatg

SEQ ID NO: 2135755 - DNA, 15 bp, Homo sapiens
gtgagggttaaatga

SEQ ID NO: 2135756 - DNA, 15 bp, Homo sapiens
tgagggttaaatgaa

SEQ ID NO: 2135757 - DNA, 15 bp, Homo sapiens
gagggttaaatgaaa

SEQ ID NO: 2135758 - DNA, 15 bp, Homo sapiens
agggttaaatgaaat

SEQ ID NO: 2135759 - DNA, 15 bp, Homo sapiens
gggttaaatgaaatc

SEQ ID NO: 2135760 - DNA, 15 bp, Homo sapiens
ggttaaatgaaatca

SEQ ID NO: 2135761 - DNA, 15 bp, Homo sapiens
gttaaatgaaatcat

SEQ ID NO: 2135762 - DNA, 15 bp, Homo sapiens
ttaaatgaaatcatg

SEQ ID NO: 2135763 - DNA, 15 bp, Homo sapiens
taaatgaaatcatgt

SEQ ID NO: 2135764 - DNA, 15 bp, Homo sapiens
aaatgaaatcatgta

SEQ ID NO: 2135765 - DNA, 15 bp, Homo sapiens
aatgaaatcatgtat

SEQ ID NO: 2135766 - DNA, 15 bp, Homo sapiens
atgaaatcatgtatg

SEQ ID NO: 2135767 - DNA, 15 bp, Homo sapiens
tgaaatcatgtatgt

SEQ ID NO: 2135768 - DNA, 15 bp, Homo sapiens
gaaatcatgtatgta

SEQ ID NO: 2135769 - DNA, 15 bp, Homo sapiens
aaatcatgtatgtaa

SEQ ID NO: 2135770 - DNA, 15 bp, Homo sapiens
aatcatgtatgtaaa

SEQ ID NO: 2135771 - DNA, 15 bp, Homo sapiens
atcatgtatgtaaag

SEQ ID NO: 2135772 - DNA, 15 bp, Homo sapiens
tcatgtatgtaaagt

SEQ ID NO: 2135773 - DNA, 15 bp, Homo sapiens
catgtatgtaaagtg

SEQ ID NO: 2135774 - DNA, 15 bp, Homo sapiens
atgtatgtaaagtgc

SEQ ID NO: 2135775 - DNA, 15 bp, Homo sapiens
tgtatgtaaagtgct

SEQ ID NO: 2135776 - DNA, 15 bp, Homo sapiens
gtatgtaaagtgctc

SEQ ID NO: 2135777 - DNA, 15 bp, Homo sapiens
tatgtaaagtgctca

SEQ ID NO: 2135778 - DNA, 15 bp, Homo sapiens
atgtaaagtgctcac

SEQ ID NO: 2135779 - DNA, 15 bp, Homo sapiens
tgtaaagtgctcacc

SEQ ID NO: 2135780 - DNA, 15 bp, Homo sapiens
gtaaagtgctcacct

SEQ ID NO: 2135781 - DNA, 15 bp, Homo sapiens
taaagtgctcaccta

SEQ ID NO: 2135782 - DNA, 15 bp, Homo sapiens
aaagtgctcacctat

SEQ ID NO: 2135783 - DNA, 15 bp, Homo sapiens
aagtgctcacctatt

SEQ ID NO: 2135784 - DNA, 15 bp, Homo sapiens
agtgctcacctattg

SEQ ID NO: 2135785 - DNA, 15 bp, Homo sapiens
gtgctcacctattgc

SEQ ID NO: 2135786 - DNA, 15 bp, Homo sapiens
tgctcacctattgca

SEQ ID NO: 2135787 - DNA, 15 bp, Homo sapiens
gctcacctattgcag

SEQ ID NO: 2135788 - DNA, 15 bp, Homo sapiens
ctcacctattgcagt

SEQ ID NO: 2135789 - DNA, 15 bp, Homo sapiens
tcacctattgcagtg

SEQ ID NO: 2135790 - DNA, 15 bp, Homo sapiens
cacctattgcagtgc

SEQ ID NO: 2135791 - DNA, 15 bp, Homo sapiens
acctattgcagtgcc

SEQ ID NO: 2135792 - DNA, 15 bp, Homo sapiens
cctattgcagtgcct

SEQ ID NO: 2135793 - DNA, 15 bp, Homo sapiens
ctattgcagtgcctg

SEQ ID NO: 2135794 - DNA, 15 bp, Homo sapiens
tattgcagtgcctgg

SEQ ID NO: 2135795 - DNA, 15 bp, Homo sapiens
attgcagtgcctggc

SEQ ID NO: 2135796 - DNA, 15 bp, Homo sapiens
ttgcagtgcctggca

SEQ ID NO: 2135797 - DNA, 15 bp, Homo sapiens
tgcagtgcctggcac

SEQ ID NO: 2135798 - DNA, 15 bp, Homo sapiens
gcagtgcctggcaca

SEQ ID NO: 2135799 - DNA, 15 bp, Homo sapiens
gtgcctggcacatgt

SEQ ID NO: 2135800 - DNA, 15 bp, Homo sapiens
tgcctggcacatgtc

SEQ ID NO: 2135801 - DNA, 15 bp, Homo sapiens
gcctggcacatgtca

SEQ ID NO: 2135802 - DNA, 15 bp, Homo sapiens
cctggcacatgtcaa

SEQ ID NO: 2135803 - DNA, 15 bp, Homo sapiens
ctggcacatgtcaag

SEQ ID NO: 2135804 - DNA, 15 bp, Homo sapiens
tggcacatgtcaagt

SEQ ID NO: 2135805 - DNA, 15 bp, Homo sapiens
ggcacatgtcaagta

SEQ ID NO: 2135806 - DNA, 15 bp, Homo sapiens
gcacatgtcaagtaa

SEQ ID NO: 2135807 - DNA, 15 bp, Homo sapiens
cacatgtcaagtaaa

SEQ ID NO: 2135808 - DNA, 15 bp, Homo sapiens
acatgtcaagtaaaa

SEQ ID NO: 2135809 - DNA, 15 bp, Homo sapiens
catgtcaagtaaaag

SEQ ID NO: 2135810 - DNA, 15 bp, Homo sapiens
atgtcaagtaaaagg

SEQ ID NO: 2135811 - DNA, 15 bp, Homo sapiens
tgtcaagtaaaaggt

SEQ ID NO: 2135812 - DNA, 15 bp, Homo sapiens
gtcaagtaaaaggta

SEQ ID NO: 2135813 - DNA, 15 bp, Homo sapiens
tcaagtaaaaggtaa

SEQ ID NO: 2135814 - DNA, 15 bp, Homo sapiens
caagtaaaaggtaac

SEQ ID NO: 2135815 - DNA, 15 bp, Homo sapiens
aagtaaaaggtaacc

SEQ ID NO: 2135816 - DNA, 15 bp, Homo sapiens
agtaaaaggtaaccc

SEQ ID NO: 2135817 - DNA, 15 bp, Homo sapiens
gtaaaaggtaaccca

SEQ ID NO: 2135818 - DNA, 15 bp, Homo sapiens
taaaaggtaacccaa

SEQ ID NO: 2135819 - DNA, 15 bp, Homo sapiens
aaaaggtaacccaag

SEQ ID NO: 2135820 - DNA, 15 bp, Homo sapiens
aaaggtaacccaaga

SEQ ID NO: 2135821 - DNA, 15 bp, Homo sapiens
aaggtaacccaagaa

SEQ ID NO: 2135822 - DNA, 15 bp, Homo sapiens
aggtaacccaagaag

SEQ ID NO: 2135823 - DNA, 15 bp, Homo sapiens
ggtaacccaagaaga

SEQ ID NO: 2135824 - DNA, 15 bp, Homo sapiens
gtaacccaagaagac

SEQ ID NO: 2135825 - DNA, 15 bp, Homo sapiens
taacccaagaagact

SEQ ID NO: 2135826 - DNA, 15 bp, Homo sapiens
aacccaagaagactc

SEQ ID NO: 2135827 - DNA, 15 bp, Homo sapiens
acccaagaagactca

SEQ ID NO: 2135828 - DNA, 15 bp, Homo sapiens
cccaagaagactcat

SEQ ID NO: 2135829 - DNA, 15 bp, Homo sapiens
ccaagaagactcata

SEQ ID NO: 2135830 - DNA, 15 bp, Homo sapiens
caagaagactcataa

SEQ ID NO: 2135831 - DNA, 15 bp, Homo sapiens
aagaagactcataag

SEQ ID NO: 2135832 - DNA, 15 bp, Homo sapiens
agaagactcataagt

SEQ ID NO: 2135833 - DNA, 15 bp, Homo sapiens
gaagactcataagtt

SEQ ID NO: 2135834 - DNA, 15 bp, Homo sapiens
aagactcataagttc

SEQ ID NO: 2135835 - DNA, 15 bp, Homo sapiens
agactcataagttca

SEQ ID NO: 2135836 - DNA, 15 bp, Homo sapiens
gactcataagttcat

SEQ ID NO: 2135837 - DNA, 15 bp, Homo sapiens
actcataagttcatt

SEQ ID NO: 2135838 - DNA, 15 bp, Homo sapiens
ctcataagttcattt

SEQ ID NO: 2135839 - DNA, 15 bp, Homo sapiens
tcataagttcatttc

SEQ ID NO: 2135840 - DNA, 15 bp, Homo sapiens
cataagttcatttcc

SEQ ID NO: 2135841 - DNA, 15 bp, Homo sapiens
ataagttcatttccc

SEQ ID NO: 2135842 - DNA, 15 bp, Homo sapiens
taagttcatttccca

SEQ ID NO: 2135843 - DNA, 15 bp, Homo sapiens
aagttcatttcccac

SEQ ID NO: 2135844 - DNA, 15 bp, Homo sapiens
agttcatttcccaca

SEQ ID NO: 2135845 - DNA, 15 bp, Homo sapiens
gttcatttcccacaa

SEQ ID NO: 2135846 - DNA, 15 bp, Homo sapiens
ttcatttcccacaat

SEQ ID NO: 2135847 - DNA, 15 bp, Homo sapiens
tcatttcccacaata

SEQ ID NO: 2135848 - DNA, 15 bp, Homo sapiens
catttcccacaatat

SEQ ID NO: 2135849 - DNA, 15 bp, Homo sapiens
atttcccacaatata

SEQ ID NO: 2135850 - DNA, 15 bp, Homo sapiens
tttcccacaatataa

SEQ ID NO: 2135851 - DNA, 15 bp, Homo sapiens
ttcccacaatataag

SEQ ID NO: 2135852 - DNA, 15 bp, Homo sapiens
tcccacaatataagt

SEQ ID NO: 2135853 - DNA, 15 bp, Homo sapiens
cccacaatataagtg

SEQ ID NO: 2135854 - DNA, 15 bp, Homo sapiens
ccacaatataagtga

SEQ ID NO: 2135855 - DNA, 15 bp, Homo sapiens
cacaatataagtgac

SEQ ID NO: 2135856 - DNA, 15 bp, Homo sapiens
acaatataagtgacc

SEQ ID NO: 2135857 - DNA, 15 bp, Homo sapiens
caatataagtgacca

SEQ ID NO: 2135858 - DNA, 15 bp, Homo sapiens
aatataagtgaccac

SEQ ID NO: 2135859 - DNA, 15 bp, Homo sapiens
atataagtgaccact

SEQ ID NO: 2135860 - DNA, 15 bp, Homo sapiens
tataagtgaccacta

SEQ ID NO: 2135861 - DNA, 15 bp, Homo sapiens
ataagtgaccactag

SEQ ID NO: 2135862 - DNA, 15 bp, Homo sapiens
taagtgaccactagc

SEQ ID NO: 2135863 - DNA, 15 bp, Homo sapiens
aagtgaccactagca

SEQ ID NO: 2135864 - DNA, 15 bp, Homo sapiens
agtgaccactagcac

SEQ ID NO: 2135865 - DNA, 15 bp, Homo sapiens
gtgaccactagcact

SEQ ID NO: 2135866 - DNA, 15 bp, Homo sapiens
tgaccactagcacta

SEQ ID NO: 2135867 - DNA, 15 bp, Homo sapiens
gaccactagcactat

SEQ ID NO: 2135868 - DNA, 15 bp, Homo sapiens
accactagcactatc

SEQ ID NO: 2135869 - DNA, 15 bp, Homo sapiens
ccactagcactatca

SEQ ID NO: 2135870 - DNA, 15 bp, Homo sapiens
cactagcactatcag

SEQ ID NO: 2135871 - DNA, 15 bp, Homo sapiens
actagcactatcagg

SEQ ID NO: 2135872 - DNA, 15 bp, Homo sapiens
ctagcactatcaggt

SEQ ID NO: 2135873 - DNA, 15 bp, Homo sapiens
tagcactatcaggta

SEQ ID NO: 2135874 - DNA, 15 bp, Homo sapiens
agcactatcaggtag

SEQ ID NO: 2135875 - DNA, 15 bp, Homo sapiens
gcactatcaggtagc

SEQ ID NO: 2135876 - DNA, 15 bp, Homo sapiens
cactatcaggtagca

SEQ ID NO: 2135877 - DNA, 15 bp, Homo sapiens
actatcaggtagcag

SEQ ID NO: 2135878 - DNA, 15 bp, Homo sapiens
ctatcaggtagcagg

SEQ ID NO: 2135879 - DNA, 15 bp, Homo sapiens
tatcaggtagcaggc

SEQ ID NO: 2135880 - DNA, 15 bp, Homo sapiens
atcaggtagcaggca

SEQ ID NO: 2135881 - DNA, 15 bp, Homo sapiens
tcaggtagcaggcag

SEQ ID NO: 2135882 - DNA, 15 bp, Homo sapiens
caggtagcaggcaga

SEQ ID NO: 2135883 - DNA, 15 bp, Homo sapiens
aggtagcaggcagag

SEQ ID NO: 2135884 - DNA, 15 bp, Homo sapiens
ggtagcaggcagagt

SEQ ID NO: 2135885 - DNA, 15 bp, Homo sapiens
gtagcaggcagagtt

SEQ ID NO: 2135886 - DNA, 15 bp, Homo sapiens
tagcaggcagagttg

SEQ ID NO: 2135887 - DNA, 15 bp, Homo sapiens
agcaggcagagttgg

SEQ ID NO: 2135888 - DNA, 15 bp, Homo sapiens
gcaggcagagttggc

SEQ ID NO: 2135889 - DNA, 15 bp, Homo sapiens
caggcagagttggca

SEQ ID NO: 2135890 - DNA, 15 bp, Homo sapiens
aggcagagttggcat

SEQ ID NO: 2135891 - DNA, 15 bp, Homo sapiens
ggcagagttggcatg

SEQ ID NO: 2135892 - DNA, 15 bp, Homo sapiens
gcagagttggcatgc

SEQ ID NO: 2135893 - DNA, 15 bp, Homo sapiens
cagagttggcatgct

SEQ ID NO: 2135894 - DNA, 15 bp, Homo sapiens
agagttggcatgctt

SEQ ID NO: 2135895 - DNA, 15 bp, Homo sapiens
gagttggcatgcttt

SEQ ID NO: 2135896 - DNA, 15 bp, Homo sapiens
agttggcatgctttg

SEQ ID NO: 2135897 - DNA, 15 bp, Homo sapiens
gttggcatgctttgg

SEQ ID NO: 2135898 - DNA, 15 bp, Homo sapiens
ttggcatgctttggt

SEQ ID NO: 2135899 - DNA, 15 bp, Homo sapiens
tggcatgctttggtt

SEQ ID NO: 2135900 - DNA, 15 bp, Homo sapiens
ggcatgctttggttc

SEQ ID NO: 2135901 - DNA, 15 bp, Homo sapiens
gcatgctttggttct

SEQ ID NO: 2135902 - DNA, 15 bp, Homo sapiens
catgctttggttcta

SEQ ID NO: 2135903 - DNA, 15 bp, Homo sapiens
atgctttggttctat

SEQ ID NO: 2135904 - DNA, 15 bp, Homo sapiens
tgctttggttctatg

SEQ ID NO: 2135905 - DNA, 15 bp, Homo sapiens
gctttggttctatgt

SEQ ID NO: 2135906 - DNA, 15 bp, Homo sapiens
ctttggttctatgta

SEQ ID NO: 2135907 - DNA, 15 bp, Homo sapiens
tttggttctatgtaa

SEQ ID NO: 2135908 - DNA, 15 bp, Homo sapiens
ttggttctatgtaag

SEQ ID NO: 2135909 - DNA, 15 bp, Homo sapiens
tggttctatgtaaga

SEQ ID NO: 2135910 - DNA, 15 bp, Homo sapiens
ggttctatgtaagaa

SEQ ID NO: 2135911 - DNA, 15 bp, Homo sapiens
gttctatgtaagaaa

SEQ ID NO: 2135912 - DNA, 15 bp, Homo sapiens
ttctatgtaagaaat

SEQ ID NO: 2135913 - DNA, 15 bp, Homo sapiens
tctatgtaagaaatc

SEQ ID NO: 2135914 - DNA, 15 bp, Homo sapiens
ctatgtaagaaatcc

SEQ ID NO: 2135915 - DNA, 15 bp, Homo sapiens
tatgtaagaaatccc

SEQ ID NO: 2135916 - DNA, 15 bp, Homo sapiens
atgtaagaaatccct

SEQ ID NO: 2135917 - DNA, 15 bp, Homo sapiens
tgtaagaaatcccta

SEQ ID NO: 2135918 - DNA, 15 bp, Homo sapiens
gtaagaaatccctaa

SEQ ID NO: 2135919 - DNA, 15 bp, Homo sapiens
taagaaatccctaag

SEQ ID NO: 2135920 - DNA, 15 bp, Homo sapiens
aagaaatccctaagg

SEQ ID NO: 2135921 - DNA, 15 bp, Homo sapiens
agaaatccctaaggt

SEQ ID NO: 2135922 - DNA, 15 bp, Homo sapiens
gaaatccctaaggta

SEQ ID NO: 2135923 - DNA, 15 bp, Homo sapiens
aaatccctaaggtaa

SEQ ID NO: 2135924 - DNA, 15 bp, Homo sapiens
aatccctaaggtaaa

SEQ ID NO: 2135925 - DNA, 15 bp, Homo sapiens
atccctaaggtaaaa

SEQ ID NO: 2135926 - DNA, 15 bp, Homo sapiens
tccctaaggtaaaag

SEQ ID NO: 2135927 - DNA, 15 bp, Homo sapiens
ccctaaggtaaaagt

SEQ ID NO: 2135928 - DNA, 15 bp, Homo sapiens
cctaaggtaaaagtt

SEQ ID NO: 2135929 - DNA, 15 bp, Homo sapiens
ctaaggtaaaagttt

SEQ ID NO: 2135930 - DNA, 15 bp, Homo sapiens
taaggtaaaagttta

SEQ ID NO: 2135931 - DNA, 15 bp, Homo sapiens
aaggtaaaagtttat

SEQ ID NO: 2135932 - DNA, 15 bp, Homo sapiens
aggtaaaagtttata

SEQ ID NO: 2135933 - DNA, 15 bp, Homo sapiens
ggtaaaagtttataa

SEQ ID NO: 2135934 - DNA, 15 bp, Homo sapiens
gtaaaagtttataaa

SEQ ID NO: 2135935 - DNA, 15 bp, Homo sapiens
taaaagtttataaat

SEQ ID NO: 2135936 - DNA, 15 bp, Homo sapiens
aaaagtttataaata

SEQ ID NO: 2135937 - DNA, 15 bp, Homo sapiens
aaagtttataaatag

SEQ ID NO: 2135938 - DNA, 15 bp, Homo sapiens
aagtttataaataga

SEQ ID NO: 2135939 - DNA, 15 bp, Homo sapiens
agtttataaatagaa

SEQ ID NO: 2135940 - DNA, 15 bp, Homo sapiens
gtttataaatagaag

SEQ ID NO: 2135941 - DNA, 15 bp, Homo sapiens
tttataaatagaaga

SEQ ID NO: 2135942 - DNA, 15 bp, Homo sapiens
ttataaatagaagag

SEQ ID NO: 2135943 - DNA, 15 bp, Homo sapiens
tataaatagaagagc

SEQ ID NO: 2135944 - DNA, 15 bp, Homo sapiens
ataaatagaagagca

SEQ ID NO: 2135945 - DNA, 15 bp, Homo sapiens
taaatagaagagcat

SEQ ID NO: 2135946 - DNA, 15 bp, Homo sapiens
aaatagaagagcatc

SEQ ID NO: 2135947 - DNA, 15 bp, Homo sapiens
aatagaagagcatct

SEQ ID NO: 2135948 - DNA, 15 bp, Homo sapiens
atagaagagcatctg

SEQ ID NO: 2135949 - DNA, 15 bp, Homo sapiens
tagaagagcatctgt

SEQ ID NO: 2135950 - DNA, 15 bp, Homo sapiens
agaagagcatctgtg

SEQ ID NO: 2135951 - DNA, 15 bp, Homo sapiens
gaagagcatctgtgt

SEQ ID NO: 2135952 - DNA, 15 bp, Homo sapiens
aagagcatctgtgtt

SEQ ID NO: 2135953 - DNA, 15 bp, Homo sapiens
agagcatctgtgttg

SEQ ID NO: 2135954 - DNA, 15 bp, Homo sapiens
gagcatctgtgttgg

SEQ ID NO: 2135955 - DNA, 15 bp, Homo sapiens
agcatctgtgttggt

SEQ ID NO: 2135956 - DNA, 15 bp, Homo sapiens
gcatctgtgttggta

SEQ ID NO: 2135957 - DNA, 15 bp, Homo sapiens
catctgtgttggtat

SEQ ID NO: 2135958 - DNA, 15 bp, Homo sapiens
atctgtgttggtatt

SEQ ID NO: 2135959 - DNA, 15 bp, Homo sapiens
tctgtgttggtattg

SEQ ID NO: 2135960 - DNA, 15 bp, Homo sapiens
ctgtgttggtattgg

SEQ ID NO: 2135961 - DNA, 15 bp, Homo sapiens
tgtgttggtattggt

SEQ ID NO: 2135962 - DNA, 15 bp, Homo sapiens
gtgttggtattggtg

SEQ ID NO: 2135963 - DNA, 15 bp, Homo sapiens
tgttggtattggtgg

SEQ ID NO: 2135964 - DNA, 15 bp, Homo sapiens
gttggtattggtggt

SEQ ID NO: 2135965 - DNA, 15 bp, Homo sapiens
tttgcatatgtgggc

SEQ ID NO: 2135966 - DNA, 15 bp, Homo sapiens
ttgcatatgtgggca

SEQ ID NO: 2135967 - DNA, 15 bp, Homo sapiens
tgcatatgtgggcaa

SEQ ID NO: 2135968 - DNA, 15 bp, Homo sapiens
gcatatgtgggcaag

SEQ ID NO: 2135969 - DNA, 15 bp, Homo sapiens
catatgtgggcaagt

SEQ ID NO: 2135970 - DNA, 15 bp, Homo sapiens
atatgtgggcaagtg

SEQ ID NO: 2135971 - DNA, 15 bp, Homo sapiens
tatgtgggcaagtgt

SEQ ID NO: 2135972 - DNA, 15 bp, Homo sapiens
atgtgggcaagtgta

SEQ ID NO: 2135973 - DNA, 15 bp, Homo sapiens
tgtgggcaagtgtac

SEQ ID NO: 2135974 - DNA, 15 bp, Homo sapiens
gtgggcaagtgtacg

SEQ ID NO: 2135975 - DNA, 15 bp, Homo sapiens
tgggcaagtgtacgt

SEQ ID NO: 2135976 - DNA, 15 bp, Homo sapiens
gggcaagtgtacgtg

SEQ ID NO: 2135977 - DNA, 15 bp, Homo sapiens
ggcaagtgtacgtgt

SEQ ID NO: 2135978 - DNA, 15 bp, Homo sapiens
gcaagtgtacgtgtg

SEQ ID NO: 2135979 - DNA, 15 bp, Homo sapiens
caagtgtacgtgtgt

SEQ ID NO: 2135980 - DNA, 15 bp, Homo sapiens
aagtgtacgtgtgtg

SEQ ID NO: 2135981 - DNA, 15 bp, Homo sapiens
agtgtacgtgtgtgt

SEQ ID NO: 2135982 - DNA, 15 bp, Homo sapiens
gtgtacgtgtgtgtg

SEQ ID NO: 2135983 - DNA, 15 bp, Homo sapiens
tgtacgtgtgtgtgt

SEQ ID NO: 2135984 - DNA, 15 bp, Homo sapiens
gtacgtgtgtgtgtg

SEQ ID NO: 2135985 - DNA, 15 bp, Homo sapiens
acgtgtgtgtgtgtc

SEQ ID NO: 2135986 - DNA, 15 bp, Homo sapiens
cgtgtgtgtgtgtca

SEQ ID NO: 2135987 - DNA, 15 bp, Homo sapiens
gtgtgtgtgtgtcat

SEQ ID NO: 2135988 - DNA, 15 bp, Homo sapiens
tgtgtgtgtgtcatg

SEQ ID NO: 2135989 - DNA, 15 bp, Homo sapiens
gtgtgtgtgtcatgt

SEQ ID NO: 2135990 - DNA, 15 bp, Homo sapiens
tgtgtgtgtcatgtg

SEQ ID NO: 2135991 - DNA, 15 bp, Homo sapiens
gtgtgtgtcatgtgt

SEQ ID NO: 2135992 - DNA, 15 bp, Homo sapiens
tgtgtgtcatgtgtg

SEQ ID NO: 2135993 - DNA, 15 bp, Homo sapiens
gtgtgtcatgtgtgg

SEQ ID NO: 2135994 - DNA, 15 bp, Homo sapiens
tgtgtcatgtgtggc

SEQ ID NO: 2135995 - DNA, 15 bp, Homo sapiens
gtgtcatgtgtggca

SEQ ID NO: 2135996 - DNA, 15 bp, Homo sapiens
tgtcatgtgtggcag

SEQ ID NO: 2135997 - DNA, 15 bp, Homo sapiens
gtcatgtgtggcaga

SEQ ID NO: 2135998 - DNA, 15 bp, Homo sapiens
tcatgtgtggcagag

SEQ ID NO: 2135999 - DNA, 15 bp, Homo sapiens
catgtgtggcagagg

SEQ ID NO: 2136000 - DNA, 15 bp, Homo sapiens
atgtgtggcagaggg

SEQ ID NO: 2136001 - DNA, 15 bp, Homo sapiens
tgtgtggcagagggg

SEQ ID NO: 2136002 - DNA, 15 bp, Homo sapiens
gtgtggcagaggggc

SEQ ID NO: 2136003 - DNA, 15 bp, Homo sapiens
tgtggcagaggggct

SEQ ID NO: 2136004 - DNA, 15 bp, Homo sapiens
gtggcagaggggctt

SEQ ID NO: 2136005 - DNA, 15 bp, Homo sapiens
tggcagaggggcttc

SEQ ID NO: 2136006 - DNA, 15 bp, Homo sapiens
ggcagaggggcttcc

SEQ ID NO: 2136007 - DNA, 15 bp, Homo sapiens
gcagaggggcttcct

SEQ ID NO: 2136008 - DNA, 15 bp, Homo sapiens
cagaggggcttccta

SEQ ID NO: 2136009 - DNA, 15 bp, Homo sapiens
agaggggcttcctaa

SEQ ID NO: 2136010 - DNA, 15 bp, Homo sapiens
gaggggcttcctaac

SEQ ID NO: 2136011 - DNA, 15 bp, Homo sapiens
aggggcttcctaacc

SEQ ID NO: 2136012 - DNA, 15 bp, Homo sapiens
ggggcttcctaaccc

SEQ ID NO: 2136013 - DNA, 15 bp, Homo sapiens
gggcttcctaacccc

SEQ ID NO: 2136014 - DNA, 15 bp, Homo sapiens
ggcttcctaacccct

SEQ ID NO: 2136015 - DNA, 15 bp, Homo sapiens
gcttcctaacccctg

SEQ ID NO: 2136016 - DNA, 15 bp, Homo sapiens
cttcctaacccctgc

SEQ ID NO: 2136017 - DNA, 15 bp, Homo sapiens
ttcctaacccctgcc

SEQ ID NO: 2136018 - DNA, 15 bp, Homo sapiens
tcctaacccctgcct

SEQ ID NO: 2136019 - DNA, 15 bp, Homo sapiens
cctaacccctgcctg

SEQ ID NO: 2136020 - DNA, 15 bp, Homo sapiens
ctaacccctgcctga

SEQ ID NO: 2136021 - DNA, 15 bp, Homo sapiens
taacccctgcctgat

SEQ ID NO: 2136022 - DNA, 15 bp, Homo sapiens
aacccctgcctgata

SEQ ID NO: 2136023 - DNA, 15 bp, Homo sapiens
acccctgcctgatag

SEQ ID NO: 2136024 - DNA, 15 bp, Homo sapiens
cccctgcctgatagg

SEQ ID NO: 2136025 - DNA, 15 bp, Homo sapiens
ccctgcctgataggt

SEQ ID NO: 2136026 - DNA, 15 bp, Homo sapiens
cctgcctgataggtg

SEQ ID NO: 2136027 - DNA, 15 bp, Homo sapiens
ctgcctgataggtgc

SEQ ID NO: 2136028 - DNA, 15 bp, Homo sapiens
tgcctgataggtgca

SEQ ID NO: 2136029 - DNA, 15 bp, Homo sapiens
gcctgataggtgcag

SEQ ID NO: 2136030 - DNA, 15 bp, Homo sapiens
cctgataggtgcaga

SEQ ID NO: 2136031 - DNA, 15 bp, Homo sapiens
ctgataggtgcagaa

SEQ ID NO: 2136032 - DNA, 15 bp, Homo sapiens
tgataggtgcagaac

SEQ ID NO: 2136033 - DNA, 15 bp, Homo sapiens
gataggtgcagaacg

SEQ ID NO: 2136034 - DNA, 15 bp, Homo sapiens
ataggtgcagaacgt

SEQ ID NO: 2136035 - DNA, 15 bp, Homo sapiens
taggtgcagaacgtc

SEQ ID NO: 2136036 - DNA, 15 bp, Homo sapiens
aggtgcagaacgtcg

SEQ ID NO: 2136037 - DNA, 15 bp, Homo sapiens
ggtgcagaacgtcgg

SEQ ID NO: 2136038 - DNA, 15 bp, Homo sapiens
gtgcagaacgtcggc

SEQ ID NO: 2136039 - DNA, 15 bp, Homo sapiens
tgcagaacgtcggct

SEQ ID NO: 2136040 - DNA, 15 bp, Homo sapiens
gcagaacgtcggcta

SEQ ID NO: 2136041 - DNA, 15 bp, Homo sapiens
cagaacgtcggctat

SEQ ID NO: 2136042 - DNA, 15 bp, Homo sapiens
agaacgtcggctatc

SEQ ID NO: 2136043 - DNA, 15 bp, Homo sapiens
gaacgtcggctatca

SEQ ID NO: 2136044 - DNA, 15 bp, Homo sapiens
aacgtcggctatcag

SEQ ID NO: 2136045 - DNA, 15 bp, Homo sapiens
acgtcggctatcaga

SEQ ID NO: 2136046 - DNA, 15 bp, Homo sapiens
cgtcggctatcagag

SEQ ID NO: 2136047 - DNA, 15 bp, Homo sapiens
gtcggctatcagagc

SEQ ID NO: 2136048 - DNA, 15 bp, Homo sapiens
tcggctatcagagca

SEQ ID NO: 2136049 - DNA, 15 bp, Homo sapiens
cggctatcagagcaa

SEQ ID NO: 2136050 - DNA, 15 bp, Homo sapiens
ggctatcagagcaag

SEQ ID NO: 2136051 - DNA, 15 bp, Homo sapiens
gctatcagagcaagc

SEQ ID NO: 2136052 - DNA, 15 bp, Homo sapiens
ctatcagagcaagca

SEQ ID NO: 2136053 - DNA, 15 bp, Homo sapiens
tatcagagcaagcat

SEQ ID NO: 2136054 - DNA, 15 bp, Homo sapiens
atcagagcaagcatt

SEQ ID NO: 2136055 - DNA, 15 bp, Homo sapiens
tcagagcaagcattg

SEQ ID NO: 2136056 - DNA, 15 bp, Homo sapiens
cagagcaagcattgt

SEQ ID NO: 2136057 - DNA, 15 bp, Homo sapiens
agagcaagcattgtg

SEQ ID NO: 2136058 - DNA, 15 bp, Homo sapiens
gagcaagcattgtgg

SEQ ID NO: 2136059 - DNA, 15 bp, Homo sapiens
agcaagcattgtgga

SEQ ID NO: 2136060 - DNA, 15 bp, Homo sapiens
gcaagcattgtggag

SEQ ID NO: 2136061 - DNA, 15 bp, Homo sapiens
caagcattgtggagc

SEQ ID NO: 2136062 - DNA, 15 bp, Homo sapiens
aagcattgtggagcg

SEQ ID NO: 2136063 - DNA, 15 bp, Homo sapiens
agcattgtggagcgg

SEQ ID NO: 2136064 - DNA, 15 bp, Homo sapiens
gcattgtggagcggt

SEQ ID NO: 2136065 - DNA, 15 bp, Homo sapiens
cattgtggagcggtt

SEQ ID NO: 2136066 - DNA, 15 bp, Homo sapiens
attgtggagcggttc

SEQ ID NO: 2136067 - DNA, 15 bp, Homo sapiens
ttgtggagcggttcc

SEQ ID NO: 2136068 - DNA, 15 bp, Homo sapiens
tgtggagcggttcct

SEQ ID NO: 2136069 - DNA, 15 bp, Homo sapiens
gtggagcggttcctt

SEQ ID NO: 2136070 - DNA, 15 bp, Homo sapiens
tggagcggttcctta

SEQ ID NO: 2136071 - DNA, 15 bp, Homo sapiens
ggagcggttccttat

SEQ ID NO: 2136072 - DNA, 15 bp, Homo sapiens
gagcggttccttatg

SEQ ID NO: 2136073 - DNA, 15 bp, Homo sapiens
agcggttccttatgc

SEQ ID NO: 2136074 - DNA, 15 bp, Homo sapiens
gcggttccttatgcc

SEQ ID NO: 2136075 - DNA, 15 bp, Homo sapiens
cggttccttatgcca

SEQ ID NO: 2136076 - DNA, 15 bp, Homo sapiens
ggttccttatgccag

SEQ ID NO: 2136077 - DNA, 15 bp, Homo sapiens
gttccttatgccagg

SEQ ID NO: 2136078 - DNA, 15 bp, Homo sapiens
ttccttatgccaggc

SEQ ID NO: 2136079 - DNA, 15 bp, Homo sapiens
tccttatgccaggct

SEQ ID NO: 2136080 - DNA, 15 bp, Homo sapiens
ccttatgccaggctg

SEQ ID NO: 2136081 - DNA, 15 bp, Homo sapiens
cttatgccaggctgc

SEQ ID NO: 2136082 - DNA, 15 bp, Homo sapiens
ttatgccaggctgcc

SEQ ID NO: 2136083 - DNA, 15 bp, Homo sapiens
tatgccaggctgcca

SEQ ID NO: 2136084 - DNA, 15 bp, Homo sapiens
atgccaggctgccat

SEQ ID NO: 2136085 - DNA, 15 bp, Homo sapiens
tgccaggctgccatg

SEQ ID NO: 2136086 - DNA, 15 bp, Homo sapiens
gccaggctgccatgt

SEQ ID NO: 2136087 - DNA, 15 bp, Homo sapiens
ccaggctgccatgtg

SEQ ID NO: 2136088 - DNA, 15 bp, Homo sapiens
caggctgccatgtga

SEQ ID NO: 2136089 - DNA, 15 bp, Homo sapiens
aggctgccatgtgag

SEQ ID NO: 2136090 - DNA, 15 bp, Homo sapiens
ggctgccatgtgaga

SEQ ID NO: 2136091 - DNA, 15 bp, Homo sapiens
gctgccatgtgagat

SEQ ID NO: 2136092 - DNA, 15 bp, Homo sapiens
ctgccatgtgagatg

SEQ ID NO: 2136093 - DNA, 15 bp, Homo sapiens
tgccatgtgagatga

SEQ ID NO: 2136094 - DNA, 15 bp, Homo sapiens
gccatgtgagatgat

SEQ ID NO: 2136095 - DNA, 15 bp, Homo sapiens
ccatgtgagatgatc

SEQ ID NO: 2136096 - DNA, 15 bp, Homo sapiens
catgtgagatgatcc

SEQ ID NO: 2136097 - DNA, 15 bp, Homo sapiens
atgtgagatgatcca

SEQ ID NO: 2136098 - DNA, 15 bp, Homo sapiens
tgtgagatgatccaa

SEQ ID NO: 2136099 - DNA, 15 bp, Homo sapiens
gtgagatgatccaag

SEQ ID NO: 2136100 - DNA, 15 bp, Homo sapiens
tgagatgatccaaga

SEQ ID NO: 2136101 - DNA, 15 bp, Homo sapiens
gagatgatccaagac

SEQ ID NO: 2136102 - DNA, 15 bp, Homo sapiens
agatgatccaagacc

SEQ ID NO: 2136103 - DNA, 15 bp, Homo sapiens
gatgatccaagacca

SEQ ID NO: 2136104 - DNA, 15 bp, Homo sapiens
atgatccaagaccaa

SEQ ID NO: 2136105 - DNA, 15 bp, Homo sapiens
tgatccaagaccaaa

SEQ ID NO: 2136106 - DNA, 15 bp, Homo sapiens
gatccaagaccaaaa

SEQ ID NO: 2136107 - DNA, 15 bp, Homo sapiens
atccaagaccaaaac

SEQ ID NO: 2136108 - DNA, 15 bp, Homo sapiens
tccaagaccaaaaca

SEQ ID NO: 2136109 - DNA, 15 bp, Homo sapiens
ccaagaccaaaacaa

SEQ ID NO: 2136110 - DNA, 15 bp, Homo sapiens
caagaccaaaacaag

SEQ ID NO: 2136111 - DNA, 15 bp, Homo sapiens
aagaccaaaacaagg

SEQ ID NO: 2136112 - DNA, 15 bp, Homo sapiens
agaccaaaacaaggc

SEQ ID NO: 2136113 - DNA, 15 bp, Homo sapiens
gaccaaaacaaggcc

SEQ ID NO: 2136114 - DNA, 15 bp, Homo sapiens
accaaaacaaggccc

SEQ ID NO: 2136115 - DNA, 15 bp, Homo sapiens
ccaaaacaaggccct

SEQ ID NO: 2136116 - DNA, 15 bp, Homo sapiens
caaaacaaggcccta

SEQ ID NO: 2136117 - DNA, 15 bp, Homo sapiens
aaaacaaggccctag

SEQ ID NO: 2136118 - DNA, 15 bp, Homo sapiens
aaacaaggccctaga

SEQ ID NO: 2136119 - DNA, 15 bp, Homo sapiens
caaggccctagactg

SEQ ID NO: 2136120 - DNA, 15 bp, Homo sapiens
aaggccctagactgc

SEQ ID NO: 2136121 - DNA, 15 bp, Homo sapiens
aggccctagactgca

SEQ ID NO: 2136122 - DNA, 15 bp, Homo sapiens
ggccctagactgcag

SEQ ID NO: 2136123 - DNA, 15 bp, Homo sapiens
gccctagactgcagt

SEQ ID NO: 2136124 - DNA, 15 bp, Homo sapiens
ccctagactgcagta

SEQ ID NO: 2136125 - DNA, 15 bp, Homo sapiens
cctagactgcagtaa

SEQ ID NO: 2136126 - DNA, 15 bp, Homo sapiens
ctagactgcagtaaa

SEQ ID NO: 2136127 - DNA, 15 bp, Homo sapiens
tagactgcagtaaaa

SEQ ID NO: 2136128 - DNA, 15 bp, Homo sapiens
agactgcagtaaaac

SEQ ID NO: 2136129 - DNA, 15 bp, Homo sapiens
gactgcagtaaaacc

SEQ ID NO: 2136130 - DNA, 15 bp, Homo sapiens
actgcagtaaaaccc

SEQ ID NO: 2136131 - DNA, 15 bp, Homo sapiens
ctgcagtaaaaccca

SEQ ID NO: 2136132 - DNA, 15 bp, Homo sapiens
tgcagtaaaacccag

SEQ ID NO: 2136133 - DNA, 15 bp, Homo sapiens
gcagtaaaacccaga

SEQ ID NO: 2136134 - DNA, 15 bp, Homo sapiens
cagtaaaacccagaa

SEQ ID NO: 2136135 - DNA, 15 bp, Homo sapiens
agtaaaacccagaac

SEQ ID NO: 2136136 - DNA, 15 bp, Homo sapiens
gtaaaacccagaact

SEQ ID NO: 2136137 - DNA, 15 bp, Homo sapiens
taaaacccagaactc

SEQ ID NO: 2136138 - DNA, 15 bp, Homo sapiens
aaaacccagaactca

SEQ ID NO: 2136139 - DNA, 15 bp, Homo sapiens
aaacccagaactcaa

SEQ ID NO: 2136140 - DNA, 15 bp, Homo sapiens
aacccagaactcaag

SEQ ID NO: 2136141 - DNA, 15 bp, Homo sapiens
acccagaactcaagt

SEQ ID NO: 2136142 - DNA, 15 bp, Homo sapiens
cccagaactcaagta

SEQ ID NO: 2136143 - DNA, 15 bp, Homo sapiens
ccagaactcaagtag

SEQ ID NO: 2136144 - DNA, 15 bp, Homo sapiens
cagaactcaagtagg

SEQ ID NO: 2136145 - DNA, 15 bp, Homo sapiens
agaactcaagtaggg

SEQ ID NO: 2136146 - DNA, 15 bp, Homo sapiens
actcaagtagggcag

SEQ ID NO: 2136147 - DNA, 15 bp, Homo sapiens
ctcaagtagggcaga

SEQ ID NO: 2136148 - DNA, 15 bp, Homo sapiens
tcaagtagggcagaa

SEQ ID NO: 2136149 - DNA, 15 bp, Homo sapiens
caagtagggcagaag

SEQ ID NO: 2136150 - DNA, 15 bp, Homo sapiens
aagtagggcagaagg

SEQ ID NO: 2136151 - DNA, 15 bp, Homo sapiens
agtagggcagaaggt

SEQ ID NO: 2136152 - DNA, 15 bp, Homo sapiens
gtagggcagaaggtg

SEQ ID NO: 2136153 - DNA, 15 bp, Homo sapiens
tagggcagaaggtgg

SEQ ID NO: 2136154 - DNA, 15 bp, Homo sapiens
agggcagaaggtgga

SEQ ID NO: 2136155 - DNA, 15 bp, Homo sapiens
gggcagaaggtggaa

SEQ ID NO: 2136156 - DNA, 15 bp, Homo sapiens
ggcagaaggtggaag

SEQ ID NO: 2136157 - DNA, 15 bp, Homo sapiens
gcagaaggtggaagg

SEQ ID NO: 2136158 - DNA, 15 bp, Homo sapiens
cagaaggtggaaggc

SEQ ID NO: 2136159 - DNA, 15 bp, Homo sapiens
agaaggtggaaggct

SEQ ID NO: 2136160 - DNA, 15 bp, Homo sapiens
gaaggtggaaggctc

SEQ ID NO: 2136161 - DNA, 15 bp, Homo sapiens
aaggtggaaggctca

SEQ ID NO: 2136162 - DNA, 15 bp, Homo sapiens
aggtggaaggctcat

SEQ ID NO: 2136163 - DNA, 15 bp, Homo sapiens
ggtggaaggctcata

SEQ ID NO: 2136164 - DNA, 15 bp, Homo sapiens
gtggaaggctcatat

SEQ ID NO: 2136165 - DNA, 15 bp, Homo sapiens
tggaaggctcatatg

SEQ ID NO: 2136166 - DNA, 15 bp, Homo sapiens
ggaaggctcatatgg

SEQ ID NO: 2136167 - DNA, 15 bp, Homo sapiens
gaaggctcatatgga

SEQ ID NO: 2136168 - DNA, 15 bp, Homo sapiens
aaggctcatatggat

SEQ ID NO: 2136169 - DNA, 15 bp, Homo sapiens
aggctcatatggata

SEQ ID NO: 2136170 - DNA, 15 bp, Homo sapiens
ggctcatatggatag

SEQ ID NO: 2136171 - DNA, 15 bp, Homo sapiens
gctcatatggataga

SEQ ID NO: 2136172 - DNA, 15 bp, Homo sapiens
ctcatatggatagaa

SEQ ID NO: 2136173 - DNA, 15 bp, Homo sapiens
tcatatggatagaag

SEQ ID NO: 2136174 - DNA, 15 bp, Homo sapiens
catatggatagaagg

SEQ ID NO: 2136175 - DNA, 15 bp, Homo sapiens
atatggatagaaggc

SEQ ID NO: 2136176 - DNA, 15 bp, Homo sapiens
tatggatagaaggcc

SEQ ID NO: 2136177 - DNA, 15 bp, Homo sapiens
atggatagaaggccc

SEQ ID NO: 2136178 - DNA, 15 bp, Homo sapiens
tggatagaaggccca

SEQ ID NO: 2136179 - DNA, 15 bp, Homo sapiens
ggatagaaggcccaa

SEQ ID NO: 2136180 - DNA, 15 bp, Homo sapiens
gatagaaggcccaaa

SEQ ID NO: 2136181 - DNA, 15 bp, Homo sapiens
atagaaggcccaaag

SEQ ID NO: 2136182 - DNA, 15 bp, Homo sapiens
tagaaggcccaaagt

SEQ ID NO: 2136183 - DNA, 15 bp, Homo sapiens
agaaggcccaaagta

SEQ ID NO: 2136184 - DNA, 15 bp, Homo sapiens
gaaggcccaaagtat

SEQ ID NO: 2136185 - DNA, 15 bp, Homo sapiens
aaggcccaaagtata

SEQ ID NO: 2136186 - DNA, 15 bp, Homo sapiens
aggcccaaagtataa

SEQ ID NO: 2136187 - DNA, 15 bp, Homo sapiens
ggcccaaagtataag

SEQ ID NO: 2136188 - DNA, 15 bp, Homo sapiens
gcccaaagtataaga

SEQ ID NO: 2136189 - DNA, 15 bp, Homo sapiens
cccaaagtataagac

SEQ ID NO: 2136190 - DNA, 15 bp, Homo sapiens
ccaaagtataagaca

SEQ ID NO: 2136191 - DNA, 15 bp, Homo sapiens
caaagtataagacag

SEQ ID NO: 2136192 - DNA, 15 bp, Homo sapiens
aaagtataagacaga

SEQ ID NO: 2136193 - DNA, 15 bp, Homo sapiens
aagtataagacagat

SEQ ID NO: 2136194 - DNA, 15 bp, Homo sapiens
agtataagacagatg

SEQ ID NO: 2136195 - DNA, 15 bp, Homo sapiens
gtataagacagatgg

SEQ ID NO: 2136196 - DNA, 15 bp, Homo sapiens
tataagacagatggt

SEQ ID NO: 2136197 - DNA, 15 bp, Homo sapiens
ataagacagatggtt

SEQ ID NO: 2136198 - DNA, 15 bp, Homo sapiens
taagacagatggttt

SEQ ID NO: 2136199 - DNA, 15 bp, Homo sapiens
aagacagatggtttg

SEQ ID NO: 2136200 - DNA, 15 bp, Homo sapiens
agacagatggtttga

SEQ ID NO: 2136201 - DNA, 15 bp, Homo sapiens
gacagatggtttgag

SEQ ID NO: 2136202 - DNA, 15 bp, Homo sapiens
acagatggtttgaga

SEQ ID NO: 2136203 - DNA, 15 bp, Homo sapiens
cagatggtttgagac

SEQ ID NO: 2136204 - DNA, 15 bp, Homo sapiens
agatggtttgagact

SEQ ID NO: 2136205 - DNA, 15 bp, Homo sapiens
gatggtttgagactt

SEQ ID NO: 2136206 - DNA, 15 bp, Homo sapiens
atggtttgagacttg

SEQ ID NO: 2136207 - DNA, 15 bp, Homo sapiens
tggtttgagacttga

SEQ ID NO: 2136208 - DNA, 15 bp, Homo sapiens
ggtttgagacttgag

SEQ ID NO: 2136209 - DNA, 15 bp, Homo sapiens
gtttgagacttgaga

SEQ ID NO: 2136210 - DNA, 15 bp, Homo sapiens
tttgagacttgagac

SEQ ID NO: 2136211 - DNA, 15 bp, Homo sapiens
ttgagacttgagacc

SEQ ID NO: 2136212 - DNA, 15 bp, Homo sapiens
tgagacttgagaccc

SEQ ID NO: 2136213 - DNA, 15 bp, Homo sapiens
gagacttgagacccg

SEQ ID NO: 2136214 - DNA, 15 bp, Homo sapiens
agacttgagacccga

SEQ ID NO: 2136215 - DNA, 15 bp, Homo sapiens
gacttgagacccgag

SEQ ID NO: 2136216 - DNA, 15 bp, Homo sapiens
acttgagacccgagg

SEQ ID NO: 2136217 - DNA, 15 bp, Homo sapiens
cttgagacccgagga

SEQ ID NO: 2136218 - DNA, 15 bp, Homo sapiens
ttgagacccgaggac

SEQ ID NO: 2136219 - DNA, 15 bp, Homo sapiens
tgagacccgaggact

SEQ ID NO: 2136220 - DNA, 15 bp, Homo sapiens
gagacccgaggacta

SEQ ID NO: 2136221 - DNA, 15 bp, Homo sapiens
agacccgaggactaa

SEQ ID NO: 2136222 - DNA, 15 bp, Homo sapiens
gacccgaggactaag

SEQ ID NO: 2136223 - DNA, 15 bp, Homo sapiens
acccgaggactaaga

SEQ ID NO: 2136224 - DNA, 15 bp, Homo sapiens
cccgaggactaagat

SEQ ID NO: 2136225 - DNA, 15 bp, Homo sapiens
ccgaggactaagatg

SEQ ID NO: 2136226 - DNA, 15 bp, Homo sapiens
cgaggactaagatgg

SEQ ID NO: 2136227 - DNA, 15 bp, Homo sapiens
gaggactaagatgga

SEQ ID NO: 2136228 - DNA, 15 bp, Homo sapiens
aggactaagatggaa

SEQ ID NO: 2136229 - DNA, 15 bp, Homo sapiens
ggactaagatggaaa

SEQ ID NO: 2136230 - DNA, 15 bp, Homo sapiens
gactaagatggaaag

SEQ ID NO: 2136231 - DNA, 15 bp, Homo sapiens
actaagatggaaagc

SEQ ID NO: 2136232 - DNA, 15 bp, Homo sapiens
ctaagatggaaagcc

SEQ ID NO: 2136233 - DNA, 15 bp, Homo sapiens
taagatggaaagccc

SEQ ID NO: 2136234 - DNA, 15 bp, Homo sapiens
aagatggaaagccca

SEQ ID NO: 2136235 - DNA, 15 bp, Homo sapiens
agatggaaagcccat

SEQ ID NO: 2136236 - DNA, 15 bp, Homo sapiens
gatggaaagcccatg

SEQ ID NO: 2136237 - DNA, 15 bp, Homo sapiens
atggaaagcccatgt

SEQ ID NO: 2136238 - DNA, 15 bp, Homo sapiens
tggaaagcccatgtt

SEQ ID NO: 2136239 - DNA, 15 bp, Homo sapiens
ggaaagcccatgttc

SEQ ID NO: 2136240 - DNA, 15 bp, Homo sapiens
gaaagcccatgttcc

SEQ ID NO: 2136241 - DNA, 15 bp, Homo sapiens
aaagcccatgttcca

SEQ ID NO: 2136242 - DNA, 15 bp, Homo sapiens
aagcccatgttccaa

SEQ ID NO: 2136243 - DNA, 15 bp, Homo sapiens
agcccatgttccaag

SEQ ID NO: 2136244 - DNA, 15 bp, Homo sapiens
gcccatgttccaaga

SEQ ID NO: 2136245 - DNA, 15 bp, Homo sapiens
cccatgttccaagat

SEQ ID NO: 2136246 - DNA, 15 bp, Homo sapiens
ccatgttccaagata

SEQ ID NO: 2136247 - DNA, 15 bp, Homo sapiens
catgttccaagatag

SEQ ID NO: 2136248 - DNA, 15 bp, Homo sapiens
atgttccaagataga

SEQ ID NO: 2136249 - DNA, 15 bp, Homo sapiens
tgttccaagatagat

SEQ ID NO: 2136250 - DNA, 15 bp, Homo sapiens
gttccaagatagata

SEQ ID NO: 2136251 - DNA, 15 bp, Homo sapiens
ttccaagatagatag

SEQ ID NO: 2136252 - DNA, 15 bp, Homo sapiens
tccaagatagataga

SEQ ID NO: 2136253 - DNA, 15 bp, Homo sapiens
ccaagatagatagaa

SEQ ID NO: 2136254 - DNA, 15 bp, Homo sapiens
caagatagatagaag

SEQ ID NO: 2136255 - DNA, 15 bp, Homo sapiens
aagatagatagaagc

SEQ ID NO: 2136256 - DNA, 15 bp, Homo sapiens
agatagatagaagcc

SEQ ID NO: 2136257 - DNA, 15 bp, Homo sapiens
gatagatagaagcct

SEQ ID NO: 2136258 - DNA, 15 bp, Homo sapiens
atagatagaagcctc

SEQ ID NO: 2136259 - DNA, 15 bp, Homo sapiens
tagatagaagcctca

SEQ ID NO: 2136260 - DNA, 15 bp, Homo sapiens
agatagaagcctcag

SEQ ID NO: 2136261 - DNA, 15 bp, Homo sapiens
gatagaagcctcagg

SEQ ID NO: 2136262 - DNA, 15 bp, Homo sapiens
atagaagcctcaggc

SEQ ID NO: 2136263 - DNA, 15 bp, Homo sapiens
tagaagcctcaggcc

SEQ ID NO: 2136264 - DNA, 15 bp, Homo sapiens
agaagcctcaggcct

SEQ ID NO: 2136265 - DNA, 15 bp, Homo sapiens
gaagcctcaggcctg

SEQ ID NO: 2136266 - DNA, 15 bp, Homo sapiens
aagcctcaggcctga

SEQ ID NO: 2136267 - DNA, 15 bp, Homo sapiens
agcctcaggcctgaa

SEQ ID NO: 2136268 - DNA, 15 bp, Homo sapiens
gcctcaggcctgaaa

SEQ ID NO: 2136269 - DNA, 15 bp, Homo sapiens
cctcaggcctgaaac

SEQ ID NO: 2136270 - DNA, 15 bp, Homo sapiens
ctcaggcctgaaacc

SEQ ID NO: 2136271 - DNA, 15 bp, Homo sapiens
tcaggcctgaaacca

SEQ ID NO: 2136272 - DNA, 15 bp, Homo sapiens
caggcctgaaaccaa

SEQ ID NO: 2136273 - DNA, 15 bp, Homo sapiens
aggcctgaaaccaac

SEQ ID NO: 2136274 - DNA, 15 bp, Homo sapiens
ggcctgaaaccaaca

SEQ ID NO: 2136275 - DNA, 15 bp, Homo sapiens
gcctgaaaccaacaa

SEQ ID NO: 2136276 - DNA, 15 bp, Homo sapiens
cctgaaaccaacaaa

SEQ ID NO: 2136277 - DNA, 15 bp, Homo sapiens
ctgaaaccaacaaaa

SEQ ID NO: 2136278 - DNA, 15 bp, Homo sapiens
tgaaaccaacaaaag

SEQ ID NO: 2136279 - DNA, 15 bp, Homo sapiens
gaaaccaacaaaagc

SEQ ID NO: 2136280 - DNA, 15 bp, Homo sapiens
aaaccaacaaaagcc

SEQ ID NO: 2136281 - DNA, 15 bp, Homo sapiens
aaccaacaaaagcct

SEQ ID NO: 2136282 - DNA, 15 bp, Homo sapiens
accaacaaaagcctc

SEQ ID NO: 2136283 - DNA, 15 bp, Homo sapiens
ccaacaaaagcctca

SEQ ID NO: 2136284 - DNA, 15 bp, Homo sapiens
caacaaaagcctcaa

SEQ ID NO: 2136285 - DNA, 15 bp, Homo sapiens
aacaaaagcctcaag

SEQ ID NO: 2136286 - DNA, 15 bp, Homo sapiens
acaaaagcctcaaga

SEQ ID NO: 2136287 - DNA, 15 bp, Homo sapiens
caaaagcctcaagag

SEQ ID NO: 2136288 - DNA, 15 bp, Homo sapiens
aaaagcctcaagagc

SEQ ID NO: 2136289 - DNA, 15 bp, Homo sapiens
aaagcctcaagagcc

SEQ ID NO: 2136290 - DNA, 15 bp, Homo sapiens
aagcctcaagagcca

SEQ ID NO: 2136291 - DNA, 15 bp, Homo sapiens
agcctcaagagccaa

SEQ ID NO: 2136292 - DNA, 15 bp, Homo sapiens
gcctcaagagccaag

SEQ ID NO: 2136293 - DNA, 15 bp, Homo sapiens
cctcaagagccaaga

SEQ ID NO: 2136294 - DNA, 15 bp, Homo sapiens
ctcaagagccaagaa

SEQ ID NO: 2136295 - DNA, 15 bp, Homo sapiens
tcaagagccaagaaa

SEQ ID NO: 2136296 - DNA, 15 bp, Homo sapiens
caagagccaagaaaa

SEQ ID NO: 2136297 - DNA, 15 bp, Homo sapiens
aagagccaagaaaac

SEQ ID NO: 2136298 - DNA, 15 bp, Homo sapiens
agagccaagaaaaca

SEQ ID NO: 2136299 - DNA, 15 bp, Homo sapiens
gagccaagaaaacag

SEQ ID NO: 2136300 - DNA, 15 bp, Homo sapiens
agccaagaaaacaga

SEQ ID NO: 2136301 - DNA, 15 bp, Homo sapiens
gccaagaaaacagag

SEQ ID NO: 2136302 - DNA, 15 bp, Homo sapiens
ccaagaaaacagagg

SEQ ID NO: 2136303 - DNA, 15 bp, Homo sapiens
caagaaaacagaggg

SEQ ID NO: 2136304 - DNA, 15 bp, Homo sapiens
aagaaaacagagggt

SEQ ID NO: 2136305 - DNA, 15 bp, Homo sapiens
agaaaacagagggtg

SEQ ID NO: 2136306 - DNA, 15 bp, Homo sapiens
gaaaacagagggtgg

SEQ ID NO: 2136307 - DNA, 15 bp, Homo sapiens
aaaacagagggtggc

SEQ ID NO: 2136308 - DNA, 15 bp, Homo sapiens
aaacagagggtggcc

SEQ ID NO: 2136309 - DNA, 15 bp, Homo sapiens
aacagagggtggcct

SEQ ID NO: 2136310 - DNA, 15 bp, Homo sapiens
acagagggtggcctg

SEQ ID NO: 2136311 - DNA, 15 bp, Homo sapiens
cagagggtggcctga

SEQ ID NO: 2136312 - DNA, 15 bp, Homo sapiens
agagggtggcctgaa

SEQ ID NO: 2136313 - DNA, 15 bp, Homo sapiens
gagggtggcctgaat

SEQ ID NO: 2136314 - DNA, 15 bp, Homo sapiens
agggtggcctgaatt

SEQ ID NO: 2136315 - DNA, 15 bp, Homo sapiens
gggtggcctgaattg

SEQ ID NO: 2136316 - DNA, 15 bp, Homo sapiens
ggtggcctgaattgg

SEQ ID NO: 2136317 - DNA, 15 bp, Homo sapiens
gtggcctgaattgga

SEQ ID NO: 2136318 - DNA, 15 bp, Homo sapiens
tggcctgaattggac

SEQ ID NO: 2136319 - DNA, 15 bp, Homo sapiens
ggcctgaattggacc

SEQ ID NO: 2136320 - DNA, 15 bp, Homo sapiens
gcctgaattggaccg

SEQ ID NO: 2136321 - DNA, 15 bp, Homo sapiens
cctgaattggaccga

SEQ ID NO: 2136322 - DNA, 15 bp, Homo sapiens
ctgaattggaccgaa

SEQ ID NO: 2136323 - DNA, 15 bp, Homo sapiens
tgaattggaccgaag

SEQ ID NO: 2136324 - DNA, 15 bp, Homo sapiens
gaattggaccgaagg

SEQ ID NO: 2136325 - DNA, 15 bp, Homo sapiens
aattggaccgaaggc

SEQ ID NO: 2136326 - DNA, 15 bp, Homo sapiens
attggaccgaaggcc

SEQ ID NO: 2136327 - DNA, 15 bp, Homo sapiens
ttggaccgaaggcct

SEQ ID NO: 2136328 - DNA, 15 bp, Homo sapiens
tggaccgaaggcctg

SEQ ID NO: 2136329 - DNA, 15 bp, Homo sapiens
ggaccgaaggcctga

SEQ ID NO: 2136330 - DNA, 15 bp, Homo sapiens
gaccgaaggcctgag

SEQ ID NO: 2136331 - DNA, 15 bp, Homo sapiens
accgaaggcctgagt

SEQ ID NO: 2136332 - DNA, 15 bp, Homo sapiens
ccgaaggcctgagtt

SEQ ID NO: 2136333 - DNA, 15 bp, Homo sapiens
cgaaggcctgagttg

SEQ ID NO: 2136334 - DNA, 15 bp, Homo sapiens
gaaggcctgagttgg

SEQ ID NO: 2136335 - DNA, 15 bp, Homo sapiens
aaggcctgagttgga

SEQ ID NO: 2136336 - DNA, 15 bp, Homo sapiens
aggcctgagttggat

SEQ ID NO: 2136337 - DNA, 15 bp, Homo sapiens
ggcctgagttggatg

SEQ ID NO: 2136338 - DNA, 15 bp, Homo sapiens
gcctgagttggatgg

SEQ ID NO: 2136339 - DNA, 15 bp, Homo sapiens
cctgagttggatgga

SEQ ID NO: 2136340 - DNA, 15 bp, Homo sapiens
ctgagttggatggaa

SEQ ID NO: 2136341 - DNA, 15 bp, Homo sapiens
tgagttggatggaag

SEQ ID NO: 2136342 - DNA, 15 bp, Homo sapiens
gagttggatggaagt

SEQ ID NO: 2136343 - DNA, 15 bp, Homo sapiens
agttggatggaagtc

SEQ ID NO: 2136344 - DNA, 15 bp, Homo sapiens
gttggatggaagtct

SEQ ID NO: 2136345 - DNA, 15 bp, Homo sapiens
ttggatggaagtctc

SEQ ID NO: 2136346 - DNA, 15 bp, Homo sapiens
tggatggaagtctca

SEQ ID NO: 2136347 - DNA, 15 bp, Homo sapiens
ggatggaagtctcaa

SEQ ID NO: 2136348 - DNA, 15 bp, Homo sapiens
gatggaagtctcaag

SEQ ID NO: 2136349 - DNA, 15 bp, Homo sapiens
atggaagtctcaagg

SEQ ID NO: 2136350 - DNA, 15 bp, Homo sapiens
tggaagtctcaaggc

SEQ ID NO: 2136351 - DNA, 15 bp, Homo sapiens
ggaagtctcaaggct

SEQ ID NO: 2136352 - DNA, 15 bp, Homo sapiens
gaagtctcaaggctt

SEQ ID NO: 2136353 - DNA, 15 bp, Homo sapiens
aagtctcaaggcttg

SEQ ID NO: 2136354 - DNA, 15 bp, Homo sapiens
agtctcaaggcttga

SEQ ID NO: 2136355 - DNA, 15 bp, Homo sapiens
gtctcaaggcttgag

SEQ ID NO: 2136356 - DNA, 15 bp, Homo sapiens
tctcaaggcttgagt

SEQ ID NO: 2136357 - DNA, 15 bp, Homo sapiens
ctcaaggcttgagtt

SEQ ID NO: 2136358 - DNA, 15 bp, Homo sapiens
tcaaggcttgagtta

SEQ ID NO: 2136359 - DNA, 15 bp, Homo sapiens
caaggcttgagttag

SEQ ID NO: 2136360 - DNA, 15 bp, Homo sapiens
aaggcttgagttaga

SEQ ID NO: 2136361 - DNA, 15 bp, Homo sapiens
aggcttgagttagaa

SEQ ID NO: 2136362 - DNA, 15 bp, Homo sapiens
ggcttgagttagaag

SEQ ID NO: 2136363 - DNA, 15 bp, Homo sapiens
gcttgagttagaagt

SEQ ID NO: 2136364 - DNA, 15 bp, Homo sapiens
cttgagttagaagtc

SEQ ID NO: 2136365 - DNA, 15 bp, Homo sapiens
ttgagttagaagtct

SEQ ID NO: 2136366 - DNA, 15 bp, Homo sapiens
tgagttagaagtctt

SEQ ID NO: 2136367 - DNA, 15 bp, Homo sapiens
gagttagaagtctta

SEQ ID NO: 2136368 - DNA, 15 bp, Homo sapiens
agttagaagtcttaa

SEQ ID NO: 2136369 - DNA, 15 bp, Homo sapiens
gttagaagtcttaag

SEQ ID NO: 2136370 - DNA, 15 bp, Homo sapiens
ttagaagtcttaaga

SEQ ID NO: 2136371 - DNA, 15 bp, Homo sapiens
tagaagtcttaagac

SEQ ID NO: 2136372 - DNA, 15 bp, Homo sapiens
agaagtcttaagacc

SEQ ID NO: 2136373 - DNA, 15 bp, Homo sapiens
gaagtcttaagacct

SEQ ID NO: 2136374 - DNA, 15 bp, Homo sapiens
aagtcttaagacctg

SEQ ID NO: 2136375 - DNA, 15 bp, Homo sapiens
agtcttaagacctgg

SEQ ID NO: 2136376 - DNA, 15 bp, Homo sapiens
gtcttaagacctggg

SEQ ID NO: 2136377 - DNA, 15 bp, Homo sapiens
tcttaagacctggga

SEQ ID NO: 2136378 - DNA, 15 bp, Homo sapiens
cttaagacctgggac

SEQ ID NO: 2136379 - DNA, 15 bp, Homo sapiens
ttaagacctgggaca

SEQ ID NO: 2136380 - DNA, 15 bp, Homo sapiens
taagacctgggacag

SEQ ID NO: 2136381 - DNA, 15 bp, Homo sapiens
aagacctgggacagg

SEQ ID NO: 2136382 - DNA, 15 bp, Homo sapiens
agacctgggacagga

SEQ ID NO: 2136383 - DNA, 15 bp, Homo sapiens
gacctgggacaggac

SEQ ID NO: 2136384 - DNA, 15 bp, Homo sapiens
acctgggacaggaca

SEQ ID NO: 2136385 - DNA, 15 bp, Homo sapiens
cctgggacaggacac

SEQ ID NO: 2136386 - DNA, 15 bp, Homo sapiens
ctgggacaggacaca

SEQ ID NO: 2136387 - DNA, 15 bp, Homo sapiens
tgggacaggacacat

SEQ ID NO: 2136388 - DNA, 15 bp, Homo sapiens
gggacaggacacatg

SEQ ID NO: 2136389 - DNA, 15 bp, Homo sapiens
ggacaggacacatgg

SEQ ID NO: 2136390 - DNA, 15 bp, Homo sapiens
gacaggacacatgga

SEQ ID NO: 2136391 - DNA, 15 bp, Homo sapiens
acaggacacatggaa

SEQ ID NO: 2136392 - DNA, 15 bp, Homo sapiens
caggacacatggaag

SEQ ID NO: 2136393 - DNA, 15 bp, Homo sapiens
aggacacatggaagg

SEQ ID NO: 2136394 - DNA, 15 bp, Homo sapiens
ggacacatggaaggc

SEQ ID NO: 2136395 - DNA, 15 bp, Homo sapiens
gacacatggaaggcc

SEQ ID NO: 2136396 - DNA, 15 bp, Homo sapiens
acacatggaaggcct

SEQ ID NO: 2136397 - DNA, 15 bp, Homo sapiens
cacatggaaggccta

SEQ ID NO: 2136398 - DNA, 15 bp, Homo sapiens
acatggaaggcctaa

SEQ ID NO: 2136399 - DNA, 15 bp, Homo sapiens
catggaaggcctaag

SEQ ID NO: 2136400 - DNA, 15 bp, Homo sapiens
atggaaggcctaaga

SEQ ID NO: 2136401 - DNA, 15 bp, Homo sapiens
tggaaggcctaagaa

SEQ ID NO: 2136402 - DNA, 15 bp, Homo sapiens
ggaaggcctaagaac

SEQ ID NO: 2136403 - DNA, 15 bp, Homo sapiens
gaaggcctaagaact

SEQ ID NO: 2136404 - DNA, 15 bp, Homo sapiens
aaggcctaagaactg

SEQ ID NO: 2136405 - DNA, 15 bp, Homo sapiens
aggcctaagaactga

SEQ ID NO: 2136406 - DNA, 15 bp, Homo sapiens
ggcctaagaactgag

SEQ ID NO: 2136407 - DNA, 15 bp, Homo sapiens
gcctaagaactgaga

SEQ ID NO: 2136408 - DNA, 15 bp, Homo sapiens
cctaagaactgagac

SEQ ID NO: 2136409 - DNA, 15 bp, Homo sapiens
ctaagaactgagact

SEQ ID NO: 2136410 - DNA, 15 bp, Homo sapiens
taagaactgagactt

SEQ ID NO: 2136411 - DNA, 15 bp, Homo sapiens
aagaactgagacttg

SEQ ID NO: 2136412 - DNA, 15 bp, Homo sapiens
agaactgagacttgt

SEQ ID NO: 2136413 - DNA, 15 bp, Homo sapiens
gaactgagacttgtg

SEQ ID NO: 2136414 - DNA, 15 bp, Homo sapiens
aactgagacttgtga

SEQ ID NO: 2136415 - DNA, 15 bp, Homo sapiens
actgagacttgtgac

SEQ ID NO: 2136416 - DNA, 15 bp, Homo sapiens
ctgagacttgtgaca

SEQ ID NO: 2136417 - DNA, 15 bp, Homo sapiens
tgagacttgtgacac

SEQ ID NO: 2136418 - DNA, 15 bp, Homo sapiens
gagacttgtgacaca

SEQ ID NO: 2136419 - DNA, 15 bp, Homo sapiens
agacttgtgacacaa

SEQ ID NO: 2136420 - DNA, 15 bp, Homo sapiens
gacttgtgacacaag

SEQ ID NO: 2136421 - DNA, 15 bp, Homo sapiens
acttgtgacacaagg

SEQ ID NO: 2136422 - DNA, 15 bp, Homo sapiens
cttgtgacacaaggc

SEQ ID NO: 2136423 - DNA, 15 bp, Homo sapiens
ttgtgacacaaggcc

SEQ ID NO: 2136424 - DNA, 15 bp, Homo sapiens
tgtgacacaaggcca

SEQ ID NO: 2136425 - DNA, 15 bp, Homo sapiens
gtgacacaaggccaa

SEQ ID NO: 2136426 - DNA, 15 bp, Homo sapiens
tgacacaaggccaac

SEQ ID NO: 2136427 - DNA, 15 bp, Homo sapiens
gacacaaggccaacg

SEQ ID NO: 2136428 - DNA, 15 bp, Homo sapiens
acacaaggccaacga

SEQ ID NO: 2136429 - DNA, 15 bp, Homo sapiens
cacaaggccaacgac

SEQ ID NO: 2136430 - DNA, 15 bp, Homo sapiens
acaaggccaacgacc

SEQ ID NO: 2136431 - DNA, 15 bp, Homo sapiens
caaggccaacgacct

SEQ ID NO: 2136432 - DNA, 15 bp, Homo sapiens
aaggccaacgaccta

SEQ ID NO: 2136433 - DNA, 15 bp, Homo sapiens
aggccaacgacctaa

SEQ ID NO: 2136434 - DNA, 15 bp, Homo sapiens
ggccaacgacctaag

SEQ ID NO: 2136435 - DNA, 15 bp, Homo sapiens
gccaacgacctaaga

SEQ ID NO: 2136436 - DNA, 15 bp, Homo sapiens
ccaacgacctaagat

SEQ ID NO: 2136437 - DNA, 15 bp, Homo sapiens
caacgacctaagatt

SEQ ID NO: 2136438 - DNA, 15 bp, Homo sapiens
aacgacctaagatta

SEQ ID NO: 2136439 - DNA, 15 bp, Homo sapiens
acgacctaagattag

SEQ ID NO: 2136440 - DNA, 15 bp, Homo sapiens
cgacctaagattagc

SEQ ID NO: 2136441 - DNA, 15 bp, Homo sapiens
gacctaagattagcc

SEQ ID NO: 2136442 - DNA, 15 bp, Homo sapiens
acctaagattagccc

SEQ ID NO: 2136443 - DNA, 15 bp, Homo sapiens
cctaagattagccca

SEQ ID NO: 2136444 - DNA, 15 bp, Homo sapiens
ctaagattagcccag

SEQ ID NO: 2136445 - DNA, 15 bp, Homo sapiens
taagattagcccagg

SEQ ID NO: 2136446 - DNA, 15 bp, Homo sapiens
aagattagcccaggg

SEQ ID NO: 2136447 - DNA, 15 bp, Homo sapiens
agattagcccagggt

SEQ ID NO: 2136448 - DNA, 15 bp, Homo sapiens
gattagcccagggtt

SEQ ID NO: 2136449 - DNA, 15 bp, Homo sapiens
attagcccagggttg

SEQ ID NO: 2136450 - DNA, 15 bp, Homo sapiens
ttagcccagggttgt

SEQ ID NO: 2136451 - DNA, 15 bp, Homo sapiens
tagcccagggttgta

SEQ ID NO: 2136452 - DNA, 15 bp, Homo sapiens
agcccagggttgtag

SEQ ID NO: 2136453 - DNA, 15 bp, Homo sapiens
gcccagggttgtagc

SEQ ID NO: 2136454 - DNA, 15 bp, Homo sapiens
cccagggttgtagct

SEQ ID NO: 2136455 - DNA, 15 bp, Homo sapiens
ccagggttgtagctg

SEQ ID NO: 2136456 - DNA, 15 bp, Homo sapiens
cagggttgtagctgg

SEQ ID NO: 2136457 - DNA, 15 bp, Homo sapiens
agggttgtagctgga

SEQ ID NO: 2136458 - DNA, 15 bp, Homo sapiens
gggttgtagctggaa

SEQ ID NO: 2136459 - DNA, 15 bp, Homo sapiens
ggttgtagctggaag

SEQ ID NO: 2136460 - DNA, 15 bp, Homo sapiens
gttgtagctggaaga

SEQ ID NO: 2136461 - DNA, 15 bp, Homo sapiens
ttgtagctggaagac

SEQ ID NO: 2136462 - DNA, 15 bp, Homo sapiens
tgtagctggaagacc

SEQ ID NO: 2136463 - DNA, 15 bp, Homo sapiens
gtagctggaagacct

SEQ ID NO: 2136464 - DNA, 15 bp, Homo sapiens
tagctggaagaccta

SEQ ID NO: 2136465 - DNA, 15 bp, Homo sapiens
agctggaagacctac

SEQ ID NO: 2136466 - DNA, 15 bp, Homo sapiens
gctggaagacctaca

SEQ ID NO: 2136467 - DNA, 15 bp, Homo sapiens
ctggaagacctacaa

SEQ ID NO: 2136468 - DNA, 15 bp, Homo sapiens
tggaagacctacaac

SEQ ID NO: 2136469 - DNA, 15 bp, Homo sapiens
ggaagacctacaacc

SEQ ID NO: 2136470 - DNA, 15 bp, Homo sapiens
gaagacctacaaccc

SEQ ID NO: 2136471 - DNA, 15 bp, Homo sapiens
aagacctacaaccca

SEQ ID NO: 2136472 - DNA, 15 bp, Homo sapiens
agacctacaacccaa

SEQ ID NO: 2136473 - DNA, 15 bp, Homo sapiens
gacctacaacccaag

SEQ ID NO: 2136474 - DNA, 15 bp, Homo sapiens
acctacaacccaagg

SEQ ID NO: 2136475 - DNA, 15 bp, Homo sapiens
cctacaacccaagga

SEQ ID NO: 2136476 - DNA, 15 bp, Homo sapiens
ctacaacccaaggat

SEQ ID NO: 2136477 - DNA, 15 bp, Homo sapiens
tacaacccaaggatg

SEQ ID NO: 2136478 - DNA, 15 bp, Homo sapiens
acaacccaaggatgg

SEQ ID NO: 2136479 - DNA, 15 bp, Homo sapiens
caacccaaggatgga

SEQ ID NO: 2136480 - DNA, 15 bp, Homo sapiens
aacccaaggatggaa

SEQ ID NO: 2136481 - DNA, 15 bp, Homo sapiens
acccaaggatggaag

SEQ ID NO: 2136482 - DNA, 15 bp, Homo sapiens
cccaaggatggaagg

SEQ ID NO: 2136483 - DNA, 15 bp, Homo sapiens
ccaaggatggaaggc

SEQ ID NO: 2136484 - DNA, 15 bp, Homo sapiens
caaggatggaaggcc

SEQ ID NO: 2136485 - DNA, 15 bp, Homo sapiens
aaggatggaaggccc

SEQ ID NO: 2136486 - DNA, 15 bp, Homo sapiens
aggatggaaggcccc

SEQ ID NO: 2136487 - DNA, 15 bp, Homo sapiens
ggatggaaggcccct

SEQ ID NO: 2136488 - DNA, 15 bp, Homo sapiens
gatggaaggcccctg

SEQ ID NO: 2136489 - DNA, 15 bp, Homo sapiens
atggaaggcccctgt

SEQ ID NO: 2136490 - DNA, 15 bp, Homo sapiens
tggaaggcccctgtc

SEQ ID NO: 2136491 - DNA, 15 bp, Homo sapiens
ggaaggcccctgtca

SEQ ID NO: 2136492 - DNA, 15 bp, Homo sapiens
gaaggcccctgtcac

SEQ ID NO: 2136493 - DNA, 15 bp, Homo sapiens
aaggcccctgtcaca

SEQ ID NO: 2136494 - DNA, 15 bp, Homo sapiens
aggcccctgtcacaa

SEQ ID NO: 2136495 - DNA, 15 bp, Homo sapiens
ggcccctgtcacaaa

SEQ ID NO: 2136496 - DNA, 15 bp, Homo sapiens
gcccctgtcacaaag

SEQ ID NO: 2136497 - DNA, 15 bp, Homo sapiens
cccctgtcacaaagc

SEQ ID NO: 2136498 - DNA, 15 bp, Homo sapiens
ccctgtcacaaagcc

SEQ ID NO: 2136499 - DNA, 15 bp, Homo sapiens
cctgtcacaaagcct

SEQ ID NO: 2136500 - DNA, 15 bp, Homo sapiens
ctgtcacaaagccta

SEQ ID NO: 2136501 - DNA, 15 bp, Homo sapiens
tgtcacaaagcctac

SEQ ID NO: 2136502 - DNA, 15 bp, Homo sapiens
gtcacaaagcctacc

SEQ ID NO: 2136503 - DNA, 15 bp, Homo sapiens
tcacaaagcctacct

SEQ ID NO: 2136504 - DNA, 15 bp, Homo sapiens
cacaaagcctaccta

SEQ ID NO: 2136505 - DNA, 15 bp, Homo sapiens
acaaagcctacctag

SEQ ID NO: 2136506 - DNA, 15 bp, Homo sapiens
caaagcctacctaga

SEQ ID NO: 2136507 - DNA, 15 bp, Homo sapiens
aaagcctacctagat

SEQ ID NO: 2136508 - DNA, 15 bp, Homo sapiens
aagcctacctagatg

SEQ ID NO: 2136509 - DNA, 15 bp, Homo sapiens
agcctacctagatgg

SEQ ID NO: 2136510 - DNA, 15 bp, Homo sapiens
gcctacctagatgga

SEQ ID NO: 2136511 - DNA, 15 bp, Homo sapiens
cctacctagatggat

SEQ ID NO: 2136512 - DNA, 15 bp, Homo sapiens
ctacctagatggata

SEQ ID NO: 2136513 - DNA, 15 bp, Homo sapiens
tacctagatggatag

SEQ ID NO: 2136514 - DNA, 15 bp, Homo sapiens
acctagatggataga

SEQ ID NO: 2136515 - DNA, 15 bp, Homo sapiens
cctagatggatagag

SEQ ID NO: 2136516 - DNA, 15 bp, Homo sapiens
ctagatggatagagg

SEQ ID NO: 2136517 - DNA, 15 bp, Homo sapiens
tagatggatagagga

SEQ ID NO: 2136518 - DNA, 15 bp, Homo sapiens
agatggatagaggac

SEQ ID NO: 2136519 - DNA, 15 bp, Homo sapiens
gatggatagaggacc

SEQ ID NO: 2136520 - DNA, 15 bp, Homo sapiens
atggatagaggaccc

SEQ ID NO: 2136521 - DNA, 15 bp, Homo sapiens
tggatagaggaccca

SEQ ID NO: 2136522 - DNA, 15 bp, Homo sapiens
ggatagaggacccaa

SEQ ID NO: 2136523 - DNA, 15 bp, Homo sapiens
gatagaggacccaag

SEQ ID NO: 2136524 - DNA, 15 bp, Homo sapiens
atagaggacccaagc

SEQ ID NO: 2136525 - DNA, 15 bp, Homo sapiens
tagaggacccaagcg

SEQ ID NO: 2136526 - DNA, 15 bp, Homo sapiens
agaggacccaagcga

SEQ ID NO: 2136527 - DNA, 15 bp, Homo sapiens
gaggacccaagcgaa

SEQ ID NO: 2136528 - DNA, 15 bp, Homo sapiens
aggacccaagcgaaa

SEQ ID NO: 2136529 - DNA, 15 bp, Homo sapiens
ggacccaagcgaaaa

SEQ ID NO: 2136530 - DNA, 15 bp, Homo sapiens
gacccaagcgaaaaa

SEQ ID NO: 2136531 - DNA, 15 bp, Homo sapiens
acccaagcgaaaaag

SEQ ID NO: 2136532 - DNA, 15 bp, Homo sapiens
cccaagcgaaaaagg

SEQ ID NO: 2136533 - DNA, 15 bp, Homo sapiens
ccaagcgaaaaaggt

SEQ ID NO: 2136534 - DNA, 15 bp, Homo sapiens
caagcgaaaaaggta

SEQ ID NO: 2136535 - DNA, 15 bp, Homo sapiens
aagcgaaaaaggtat

SEQ ID NO: 2136536 - DNA, 15 bp, Homo sapiens
agcgaaaaaggtatc

SEQ ID NO: 2136537 - DNA, 15 bp, Homo sapiens
gcgaaaaaggtatct

SEQ ID NO: 2136538 - DNA, 15 bp, Homo sapiens
cgaaaaaggtatctc

SEQ ID NO: 2136539 - DNA, 15 bp, Homo sapiens
gaaaaaggtatctca

SEQ ID NO: 2136540 - DNA, 15 bp, Homo sapiens
aaaaaggtatctcaa

SEQ ID NO: 2136541 - DNA, 15 bp, Homo sapiens
aaaaggtatctcaag

SEQ ID NO: 2136542 - DNA, 15 bp, Homo sapiens
aaaggtatctcaaga

SEQ ID NO: 2136543 - DNA, 15 bp, Homo sapiens
aaggtatctcaagac

SEQ ID NO: 2136544 - DNA, 15 bp, Homo sapiens
aggtatctcaagact

SEQ ID NO: 2136545 - DNA, 15 bp, Homo sapiens
ggtatctcaagacta

SEQ ID NO: 2136546 - DNA, 15 bp, Homo sapiens
gtatctcaagactaa

SEQ ID NO: 2136547 - DNA, 15 bp, Homo sapiens
tatctcaagactaac

SEQ ID NO: 2136548 - DNA, 15 bp, Homo sapiens
atctcaagactaacg

SEQ ID NO: 2136549 - DNA, 15 bp, Homo sapiens
tctcaagactaacgg

SEQ ID NO: 2136550 - DNA, 15 bp, Homo sapiens
ctcaagactaacggc

SEQ ID NO: 2136551 - DNA, 15 bp, Homo sapiens
tcaagactaacggcc

SEQ ID NO: 2136552 - DNA, 15 bp, Homo sapiens
caagactaacggccg

SEQ ID NO: 2136553 - DNA, 15 bp, Homo sapiens
aagactaacggccgg

SEQ ID NO: 2136554 - DNA, 15 bp, Homo sapiens
agactaacggccgga

SEQ ID NO: 2136555 - DNA, 15 bp, Homo sapiens
gactaacggccggaa

SEQ ID NO: 2136556 - DNA, 15 bp, Homo sapiens
actaacggccggaat

SEQ ID NO: 2136557 - DNA, 15 bp, Homo sapiens
ctaacggccggaatc

SEQ ID NO: 2136558 - DNA, 15 bp, Homo sapiens
taacggccggaatct

SEQ ID NO: 2136559 - DNA, 15 bp, Homo sapiens
aacggccggaatctg

SEQ ID NO: 2136560 - DNA, 15 bp, Homo sapiens
acggccggaatctgg

SEQ ID NO: 2136561 - DNA, 15 bp, Homo sapiens
cggccggaatctgga

SEQ ID NO: 2136562 - DNA, 15 bp, Homo sapiens
ggccggaatctggag

SEQ ID NO: 2136563 - DNA, 15 bp, Homo sapiens
gccggaatctggagg

SEQ ID NO: 2136564 - DNA, 15 bp, Homo sapiens
ccggaatctggaggc

SEQ ID NO: 2136565 - DNA, 15 bp, Homo sapiens
cggaatctggaggcc

SEQ ID NO: 2136566 - DNA, 15 bp, Homo sapiens
ggaatctggaggccc

SEQ ID NO: 2136567 - DNA, 15 bp, Homo sapiens
gaatctggaggccca

SEQ ID NO: 2136568 - DNA, 15 bp, Homo sapiens
aatctggaggcccat

SEQ ID NO: 2136569 - DNA, 15 bp, Homo sapiens
atctggaggcccatg

SEQ ID NO: 2136570 - DNA, 15 bp, Homo sapiens
tctggaggcccatga

SEQ ID NO: 2136571 - DNA, 15 bp, Homo sapiens
ctggaggcccatgac

SEQ ID NO: 2136572 - DNA, 15 bp, Homo sapiens
tggaggcccatgacc

SEQ ID NO: 2136573 - DNA, 15 bp, Homo sapiens
ggaggcccatgaccc

SEQ ID NO: 2136574 - DNA, 15 bp, Homo sapiens
gaggcccatgaccca

SEQ ID NO: 2136575 - DNA, 15 bp, Homo sapiens
aggcccatgacccag

SEQ ID NO: 2136576 - DNA, 15 bp, Homo sapiens
ggcccatgacccaga

SEQ ID NO: 2136577 - DNA, 15 bp, Homo sapiens
gcccatgacccagaa

SEQ ID NO: 2136578 - DNA, 15 bp, Homo sapiens
cccatgacccagaac

SEQ ID NO: 2136579 - DNA, 15 bp, Homo sapiens
ccatgacccagaacc

SEQ ID NO: 2136580 - DNA, 15 bp, Homo sapiens
catgacccagaaccc

SEQ ID NO: 2136581 - DNA, 15 bp, Homo sapiens
atgacccagaaccca

SEQ ID NO: 2136582 - DNA, 15 bp, Homo sapiens
tgacccagaacccag

SEQ ID NO: 2136583 - DNA, 15 bp, Homo sapiens
gacccagaacccagg

SEQ ID NO: 2136584 - DNA, 15 bp, Homo sapiens
acccagaacccagga

SEQ ID NO: 2136585 - DNA, 15 bp, Homo sapiens
cccagaacccaggaa

SEQ ID NO: 2136586 - DNA, 15 bp, Homo sapiens
ccagaacccaggaag

SEQ ID NO: 2136587 - DNA, 15 bp, Homo sapiens
cagaacccaggaagg

SEQ ID NO: 2136588 - DNA, 15 bp, Homo sapiens
agaacccaggaagga

SEQ ID NO: 2136589 - DNA, 15 bp, Homo sapiens
gaacccaggaaggat

SEQ ID NO: 2136590 - DNA, 15 bp, Homo sapiens
aacccaggaaggata

SEQ ID NO: 2136591 - DNA, 15 bp, Homo sapiens
acccaggaaggatag

SEQ ID NO: 2136592 - DNA, 15 bp, Homo sapiens
cccaggaaggataga

SEQ ID NO: 2136593 - DNA, 15 bp, Homo sapiens
ccaggaaggatagaa

SEQ ID NO: 2136594 - DNA, 15 bp, Homo sapiens
caggaaggatagaag

SEQ ID NO: 2136595 - DNA, 15 bp, Homo sapiens
aggaaggatagaagc

SEQ ID NO: 2136596 - DNA, 15 bp, Homo sapiens
ggaaggatagaagct

SEQ ID NO: 2136597 - DNA, 15 bp, Homo sapiens
gaaggatagaagctt

SEQ ID NO: 2136598 - DNA, 15 bp, Homo sapiens
aaggatagaagcttg

SEQ ID NO: 2136599 - DNA, 15 bp, Homo sapiens
aggatagaagcttga

SEQ ID NO: 2136600 - DNA, 15 bp, Homo sapiens
ggatagaagcttgaa

SEQ ID NO: 2136601 - DNA, 15 bp, Homo sapiens
gatagaagcttgaag

SEQ ID NO: 2136602 - DNA, 15 bp, Homo sapiens
atagaagcttgaaga

SEQ ID NO: 2136603 - DNA, 15 bp, Homo sapiens
tagaagcttgaagac

SEQ ID NO: 2136604 - DNA, 15 bp, Homo sapiens
agaagcttgaagacc

SEQ ID NO: 2136605 - DNA, 15 bp, Homo sapiens
gaagcttgaagacct

SEQ ID NO: 2136606 - DNA, 15 bp, Homo sapiens
aagcttgaagacctg

SEQ ID NO: 2136607 - DNA, 15 bp, Homo sapiens
agcttgaagacctgg

SEQ ID NO: 2136608 - DNA, 15 bp, Homo sapiens
gcttgaagacctggg

SEQ ID NO: 2136609 - DNA, 15 bp, Homo sapiens
cttgaagacctgggg

SEQ ID NO: 2136610 - DNA, 15 bp, Homo sapiens
ttgaagacctgggga

SEQ ID NO: 2136611 - DNA, 15 bp, Homo sapiens
tgaagacctggggaa

SEQ ID NO: 2136612 - DNA, 15 bp, Homo sapiens
gaagacctggggaaa

SEQ ID NO: 2136613 - DNA, 15 bp, Homo sapiens
aagacctggggaaat

SEQ ID NO: 2136614 - DNA, 15 bp, Homo sapiens
agacctggggaaatc

SEQ ID NO: 2136615 - DNA, 15 bp, Homo sapiens
gacctggggaaatcc

SEQ ID NO: 2136616 - DNA, 15 bp, Homo sapiens
acctggggaaatccc

SEQ ID NO: 2136617 - DNA, 15 bp, Homo sapiens
cctggggaaatccca

SEQ ID NO: 2136618 - DNA, 15 bp, Homo sapiens
ctggggaaatcccaa

SEQ ID NO: 2136619 - DNA, 15 bp, Homo sapiens
tggggaaatcccaag

SEQ ID NO: 2136620 - DNA, 15 bp, Homo sapiens
ggggaaatcccaaga

SEQ ID NO: 2136621 - DNA, 15 bp, Homo sapiens
gggaaatcccaagat

SEQ ID NO: 2136622 - DNA, 15 bp, Homo sapiens
ggaaatcccaagatg

SEQ ID NO: 2136623 - DNA, 15 bp, Homo sapiens
gaaatcccaagatga

SEQ ID NO: 2136624 - DNA, 15 bp, Homo sapiens
aaatcccaagatgag

SEQ ID NO: 2136625 - DNA, 15 bp, Homo sapiens
aatcccaagatgaga

SEQ ID NO: 2136626 - DNA, 15 bp, Homo sapiens
atcccaagatgagaa

SEQ ID NO: 2136627 - DNA, 15 bp, Homo sapiens
tcccaagatgagaac

SEQ ID NO: 2136628 - DNA, 15 bp, Homo sapiens
cccaagatgagaacc

SEQ ID NO: 2136629 - DNA, 15 bp, Homo sapiens
ccaagatgagaaccc

SEQ ID NO: 2136630 - DNA, 15 bp, Homo sapiens
caagatgagaaccct

SEQ ID NO: 2136631 - DNA, 15 bp, Homo sapiens
aagatgagaacccta

SEQ ID NO: 2136632 - DNA, 15 bp, Homo sapiens
agatgagaaccctaa

SEQ ID NO: 2136633 - DNA, 15 bp, Homo sapiens
gatgagaaccctaaa

SEQ ID NO: 2136634 - DNA, 15 bp, Homo sapiens
atgagaaccctaaac

SEQ ID NO: 2136635 - DNA, 15 bp, Homo sapiens
tgagaaccctaaacc

SEQ ID NO: 2136636 - DNA, 15 bp, Homo sapiens
gagaaccctaaaccc

SEQ ID NO: 2136637 - DNA, 15 bp, Homo sapiens
agaaccctaaaccct

SEQ ID NO: 2136638 - DNA, 15 bp, Homo sapiens
gaaccctaaacccta

SEQ ID NO: 2136639 - DNA, 15 bp, Homo sapiens
aaccctaaaccctac

SEQ ID NO: 2136640 - DNA, 15 bp, Homo sapiens
accctaaaccctacc

SEQ ID NO: 2136641 - DNA, 15 bp, Homo sapiens
ccctaaaccctacct

SEQ ID NO: 2136642 - DNA, 15 bp, Homo sapiens
cctaaaccctacctc

SEQ ID NO: 2136643 - DNA, 15 bp, Homo sapiens
ctaaaccctacctct

SEQ ID NO: 2136644 - DNA, 15 bp, Homo sapiens
taaaccctacctctt

SEQ ID NO: 2136645 - DNA, 15 bp, Homo sapiens
aaaccctacctcttt

SEQ ID NO: 2136646 - DNA, 15 bp, Homo sapiens
aaccctacctctttt

SEQ ID NO: 2136647 - DNA, 15 bp, Homo sapiens
accctacctcttttc

SEQ ID NO: 2136648 - DNA, 15 bp, Homo sapiens
ccctacctcttttct

SEQ ID NO: 2136649 - DNA, 15 bp, Homo sapiens
cctacctcttttcta

SEQ ID NO: 2136650 - DNA, 15 bp, Homo sapiens
ctacctcttttctat

SEQ ID NO: 2136651 - DNA, 15 bp, Homo sapiens
tacctcttttctatt

SEQ ID NO: 2136652 - DNA, 15 bp, Homo sapiens
acctcttttctattg

SEQ ID NO: 2136653 - DNA, 15 bp, Homo sapiens
cctcttttctattgt

SEQ ID NO: 2136654 - DNA, 15 bp, Homo sapiens
ctcttttctattgtt

SEQ ID NO: 2136655 - DNA, 15 bp, Homo sapiens
tcttttctattgttt

SEQ ID NO: 2136656 - DNA, 15 bp, Homo sapiens
cttttctattgttta

SEQ ID NO: 2136657 - DNA, 15 bp, Homo sapiens
ttttctattgtttac

SEQ ID NO: 2136658 - DNA, 15 bp, Homo sapiens
tttctattgtttaca

SEQ ID NO: 2136659 - DNA, 15 bp, Homo sapiens
ttctattgtttacac

SEQ ID NO: 2136660 - DNA, 15 bp, Homo sapiens
tctattgtttacact

SEQ ID NO: 2136661 - DNA, 15 bp, Homo sapiens
ctattgtttacactt

SEQ ID NO: 2136662 - DNA, 15 bp, Homo sapiens
tattgtttacacttc

SEQ ID NO: 2136663 - DNA, 15 bp, Homo sapiens
attgtttacacttct

SEQ ID NO: 2136664 - DNA, 15 bp, Homo sapiens
ttgtttacacttctt

SEQ ID NO: 2136665 - DNA, 15 bp, Homo sapiens
tgtttacacttctta

SEQ ID NO: 2136666 - DNA, 15 bp, Homo sapiens
gtttacacttcttac

SEQ ID NO: 2136667 - DNA, 15 bp, Homo sapiens
tttacacttcttact

SEQ ID NO: 2136668 - DNA, 15 bp, Homo sapiens
ttacacttcttactc

SEQ ID NO: 2136669 - DNA, 15 bp, Homo sapiens
tacacttcttactct

SEQ ID NO: 2136670 - DNA, 15 bp, Homo sapiens
acacttcttactctt

SEQ ID NO: 2136671 - DNA, 15 bp, Homo sapiens
cacttcttactctta

SEQ ID NO: 2136672 - DNA, 15 bp, Homo sapiens
acttcttactcttag

SEQ ID NO: 2136673 - DNA, 15 bp, Homo sapiens
cttcttactcttaga

SEQ ID NO: 2136674 - DNA, 15 bp, Homo sapiens
ttcttactcttagat

SEQ ID NO: 2136675 - DNA, 15 bp, Homo sapiens
tcttactcttagata

SEQ ID NO: 2136676 - DNA, 15 bp, Homo sapiens
cttactcttagatat

SEQ ID NO: 2136677 - DNA, 15 bp, Homo sapiens
ttactcttagatatt

SEQ ID NO: 2136678 - DNA, 15 bp, Homo sapiens
tactcttagatattt

SEQ ID NO: 2136679 - DNA, 15 bp, Homo sapiens
actcttagatatttc

SEQ ID NO: 2136680 - DNA, 15 bp, Homo sapiens
ctcttagatatttcc

SEQ ID NO: 2136681 - DNA, 15 bp, Homo sapiens
tcttagatatttcca

SEQ ID NO: 2136682 - DNA, 15 bp, Homo sapiens
cttagatatttccag

SEQ ID NO: 2136683 - DNA, 15 bp, Homo sapiens
ttagatatttccagt

SEQ ID NO: 2136684 - DNA, 15 bp, Homo sapiens
tagatatttccagtt

SEQ ID NO: 2136685 - DNA, 15 bp, Homo sapiens
agatatttccagttc

SEQ ID NO: 2136686 - DNA, 15 bp, Homo sapiens
gatatttccagttct

SEQ ID NO: 2136687 - DNA, 15 bp, Homo sapiens
atatttccagttctc

SEQ ID NO: 2136688 - DNA, 15 bp, Homo sapiens
tatttccagttctcc

SEQ ID NO: 2136689 - DNA, 15 bp, Homo sapiens
atttccagttctcct

SEQ ID NO: 2136690 - DNA, 15 bp, Homo sapiens
tttccagttctcctg

SEQ ID NO: 2136691 - DNA, 15 bp, Homo sapiens
ttccagttctcctgt

SEQ ID NO: 2136692 - DNA, 15 bp, Homo sapiens
tccagttctcctgtt

SEQ ID NO: 2136693 - DNA, 15 bp, Homo sapiens
ccagttctcctgttt

SEQ ID NO: 2136694 - DNA, 15 bp, Homo sapiens
cagttctcctgttta

SEQ ID NO: 2136695 - DNA, 15 bp, Homo sapiens
agttctcctgtttat

SEQ ID NO: 2136696 - DNA, 15 bp, Homo sapiens
gttctcctgtttatc

SEQ ID NO: 2136697 - DNA, 15 bp, Homo sapiens
ttctcctgtttatct

SEQ ID NO: 2136698 - DNA, 15 bp, Homo sapiens
tctcctgtttatctt

SEQ ID NO: 2136699 - DNA, 15 bp, Homo sapiens
ctcctgtttatcttt

SEQ ID NO: 2136700 - DNA, 15 bp, Homo sapiens
tcctgtttatcttta

SEQ ID NO: 2136701 - DNA, 15 bp, Homo sapiens
cctgtttatctttaa

SEQ ID NO: 2136702 - DNA, 15 bp, Homo sapiens
ctgtttatctttaag

SEQ ID NO: 2136703 - DNA, 15 bp, Homo sapiens
tgtttatctttaagc

SEQ ID NO: 2136704 - DNA, 15 bp, Homo sapiens
gtttatctttaagcc

SEQ ID NO: 2136705 - DNA, 15 bp, Homo sapiens
tttatctttaagcct

SEQ ID NO: 2136706 - DNA, 15 bp, Homo sapiens
ttatctttaagcctg

SEQ ID NO: 2136707 - DNA, 15 bp, Homo sapiens
tatctttaagcctga

SEQ ID NO: 2136708 - DNA, 15 bp, Homo sapiens
atctttaagcctgat

SEQ ID NO: 2136709 - DNA, 15 bp, Homo sapiens
tctttaagcctgatt

SEQ ID NO: 2136710 - DNA, 15 bp, Homo sapiens
ctttaagcctgattc

SEQ ID NO: 2136711 - DNA, 15 bp, Homo sapiens
tttaagcctgattct

SEQ ID NO: 2136712 - DNA, 15 bp, Homo sapiens
ttaagcctgattctt

SEQ ID NO: 2136713 - DNA, 15 bp, Homo sapiens
taagcctgattcttt

SEQ ID NO: 2136714 - DNA, 15 bp, Homo sapiens
aagcctgattctttt

SEQ ID NO: 2136715 - DNA, 15 bp, Homo sapiens
agcctgattcttttg

SEQ ID NO: 2136716 - DNA, 15 bp, Homo sapiens
gcctgattcttttga

SEQ ID NO: 2136717 - DNA, 15 bp, Homo sapiens
cctgattcttttgag

SEQ ID NO: 2136718 - DNA, 15 bp, Homo sapiens
ctgattcttttgaga

SEQ ID NO: 2136719 - DNA, 15 bp, Homo sapiens
tgattcttttgagat

SEQ ID NO: 2136720 - DNA, 15 bp, Homo sapiens
gattcttttgagatg

SEQ ID NO: 2136721 - DNA, 15 bp, Homo sapiens
attcttttgagatgt

SEQ ID NO: 2136722 - DNA, 15 bp, Homo sapiens
ttcttttgagatgta

SEQ ID NO: 2136723 - DNA, 15 bp, Homo sapiens
tcttttgagatgtac

SEQ ID NO: 2136724 - DNA, 15 bp, Homo sapiens
cttttgagatgtact

SEQ ID NO: 2136725 - DNA, 15 bp, Homo sapiens
ttttgagatgtactt

SEQ ID NO: 2136726 - DNA, 15 bp, Homo sapiens
tttgagatgtacttt

SEQ ID NO: 2136727 - DNA, 15 bp, Homo sapiens
ttgagatgtactttt

SEQ ID NO: 2136728 - DNA, 15 bp, Homo sapiens
tgagatgtacttttt

SEQ ID NO: 2136729 - DNA, 15 bp, Homo sapiens
gagatgtactttttg

SEQ ID NO: 2136730 - DNA, 15 bp, Homo sapiens
agatgtactttttga

SEQ ID NO: 2136731 - DNA, 15 bp, Homo sapiens
gatgtactttttgat

SEQ ID NO: 2136732 - DNA, 15 bp, Homo sapiens
atgtactttttgatg

SEQ ID NO: 2136733 - DNA, 15 bp, Homo sapiens
tgtactttttgatgt

SEQ ID NO: 2136734 - DNA, 15 bp, Homo sapiens
gtactttttgatgtt

SEQ ID NO: 2136735 - DNA, 15 bp, Homo sapiens
tactttttgatgttg

SEQ ID NO: 2136736 - DNA, 15 bp, Homo sapiens
actttttgatgttgc

SEQ ID NO: 2136737 - DNA, 15 bp, Homo sapiens
ctttttgatgttgcc

SEQ ID NO: 2136738 - DNA, 15 bp, Homo sapiens
tttttgatgttgccg

SEQ ID NO: 2136739 - DNA, 15 bp, Homo sapiens
ttttgatgttgccgg

SEQ ID NO: 2136740 - DNA, 15 bp, Homo sapiens
tttgatgttgccggt

SEQ ID NO: 2136741 - DNA, 15 bp, Homo sapiens
ttgatgttgccggtt

SEQ ID NO: 2136742 - DNA, 15 bp, Homo sapiens
tgatgttgccggtta

SEQ ID NO: 2136743 - DNA, 15 bp, Homo sapiens
gatgttgccggttac

SEQ ID NO: 2136744 - DNA, 15 bp, Homo sapiens
atgttgccggttacc

SEQ ID NO: 2136745 - DNA, 15 bp, Homo sapiens
tgttgccggttacct

SEQ ID NO: 2136746 - DNA, 15 bp, Homo sapiens
gttgccggttacctt

SEQ ID NO: 2136747 - DNA, 15 bp, Homo sapiens
ttgccggttaccttt

SEQ ID NO: 2136748 - DNA, 15 bp, Homo sapiens
tgccggttaccttta

SEQ ID NO: 2136749 - DNA, 15 bp, Homo sapiens
gccggttacctttag

SEQ ID NO: 2136750 - DNA, 15 bp, Homo sapiens
ccggttacctttaga

SEQ ID NO: 2136751 - DNA, 15 bp, Homo sapiens
cggttacctttagat

SEQ ID NO: 2136752 - DNA, 15 bp, Homo sapiens
ggttacctttagatt

SEQ ID NO: 2136753 - DNA, 15 bp, Homo sapiens
gttacctttagattg

SEQ ID NO: 2136754 - DNA, 15 bp, Homo sapiens
ttacctttagattga

SEQ ID NO: 2136755 - DNA, 15 bp, Homo sapiens
tacctttagattgac

SEQ ID NO: 2136756 - DNA, 15 bp, Homo sapiens
acctttagattgaca

SEQ ID NO: 2136757 - DNA, 15 bp, Homo sapiens
cctttagattgacag

SEQ ID NO: 2136758 - DNA, 15 bp, Homo sapiens
ctttagattgacagt

SEQ ID NO: 2136759 - DNA, 15 bp, Homo sapiens
tttagattgacagta

SEQ ID NO: 2136760 - DNA, 15 bp, Homo sapiens
ttagattgacagtat

SEQ ID NO: 2136761 - DNA, 15 bp, Homo sapiens
tagattgacagtatt

SEQ ID NO: 2136762 - DNA, 15 bp, Homo sapiens
agattgacagtatta

SEQ ID NO: 2136763 - DNA, 15 bp, Homo sapiens
gattgacagtattat

SEQ ID NO: 2136764 - DNA, 15 bp, Homo sapiens
attgacagtattatg

SEQ ID NO: 2136765 - DNA, 15 bp, Homo sapiens
ttgacagtattatgc

SEQ ID NO: 2136766 - DNA, 15 bp, Homo sapiens
tgacagtattatgcc

SEQ ID NO: 2136767 - DNA, 15 bp, Homo sapiens
gacagtattatgcct

SEQ ID NO: 2136768 - DNA, 15 bp, Homo sapiens
acagtattatgcctg

SEQ ID NO: 2136769 - DNA, 15 bp, Homo sapiens
cagtattatgcctgg

SEQ ID NO: 2136770 - DNA, 15 bp, Homo sapiens
agtattatgcctggg

SEQ ID NO: 2136771 - DNA, 15 bp, Homo sapiens
gtattatgcctgggc

SEQ ID NO: 2136772 - DNA, 15 bp, Homo sapiens
tattatgcctgggcc

SEQ ID NO: 2136773 - DNA, 15 bp, Homo sapiens
attatgcctgggcca

SEQ ID NO: 2136774 - DNA, 15 bp, Homo sapiens
ttatgcctgggccag

SEQ ID NO: 2136775 - DNA, 15 bp, Homo sapiens
tatgcctgggccagt

SEQ ID NO: 2136776 - DNA, 15 bp, Homo sapiens
atgcctgggccagtc

SEQ ID NO: 2136777 - DNA, 15 bp, Homo sapiens
tgcctgggccagtct

SEQ ID NO: 2136778 - DNA, 15 bp, Homo sapiens
gcctgggccagtctt

SEQ ID NO: 2136779 - DNA, 15 bp, Homo sapiens
cctgggccagtcttg

SEQ ID NO: 2136780 - DNA, 15 bp, Homo sapiens
ctgggccagtcttga

SEQ ID NO: 2136781 - DNA, 15 bp, Homo sapiens
tgggccagtcttgag

SEQ ID NO: 2136782 - DNA, 15 bp, Homo sapiens
gggccagtcttgagc

SEQ ID NO: 2136783 - DNA, 15 bp, Homo sapiens
ggccagtcttgagcc

SEQ ID NO: 2136784 - DNA, 15 bp, Homo sapiens
gccagtcttgagcca

SEQ ID NO: 2136785 - DNA, 15 bp, Homo sapiens
ccagtcttgagccag

SEQ ID NO: 2136786 - DNA, 15 bp, Homo sapiens
cagtcttgagccagc

SEQ ID NO: 2136787 - DNA, 15 bp, Homo sapiens
agtcttgagccagct

SEQ ID NO: 2136788 - DNA, 15 bp, Homo sapiens
gtcttgagccagctt

SEQ ID NO: 2136789 - DNA, 15 bp, Homo sapiens
tcttgagccagcttt

SEQ ID NO: 2136790 - DNA, 15 bp, Homo sapiens
cttgagccagcttta

SEQ ID NO: 2136791 - DNA, 15 bp, Homo sapiens
ttgagccagctttaa

SEQ ID NO: 2136792 - DNA, 15 bp, Homo sapiens
tgagccagctttaaa

SEQ ID NO: 2136793 - DNA, 15 bp, Homo sapiens
gagccagctttaaat

SEQ ID NO: 2136794 - DNA, 15 bp, Homo sapiens
agccagctttaaatc

SEQ ID NO: 2136795 - DNA, 15 bp, Homo sapiens
gccagctttaaatca

SEQ ID NO: 2136796 - DNA, 15 bp, Homo sapiens
ccagctttaaatcac

SEQ ID NO: 2136797 - DNA, 15 bp, Homo sapiens
cagctttaaatcaca

SEQ ID NO: 2136798 - DNA, 15 bp, Homo sapiens
agctttaaatcacag

SEQ ID NO: 2136799 - DNA, 15 bp, Homo sapiens
gctttaaatcacagc

SEQ ID NO: 2136800 - DNA, 15 bp, Homo sapiens
ctttaaatcacagct

SEQ ID NO: 2136801 - DNA, 15 bp, Homo sapiens
tttaaatcacagctt

SEQ ID NO: 2136802 - DNA, 15 bp, Homo sapiens
ttaaatcacagcttt

SEQ ID NO: 2136803 - DNA, 15 bp, Homo sapiens
taaatcacagctttt

SEQ ID NO: 2136804 - DNA, 15 bp, Homo sapiens
aaatcacagctttta

SEQ ID NO: 2136805 - DNA, 15 bp, Homo sapiens
aatcacagcttttac

SEQ ID NO: 2136806 - DNA, 15 bp, Homo sapiens
atcacagcttttacc

SEQ ID NO: 2136807 - DNA, 15 bp, Homo sapiens
gtgaagcattatgta

SEQ ID NO: 2136808 - DNA, 15 bp, Homo sapiens
tgaagcattatgtaa

SEQ ID NO: 2136809 - DNA, 15 bp, Homo sapiens
gaagcattatgtaaa

SEQ ID NO: 2136810 - DNA, 15 bp, Homo sapiens
aagcattatgtaaat

SEQ ID NO: 2136811 - DNA, 15 bp, Homo sapiens
agcattatgtaaatc

SEQ ID NO: 2136812 - DNA, 15 bp, Homo sapiens
gcattatgtaaatca

SEQ ID NO: 2136813 - DNA, 15 bp, Homo sapiens
cattatgtaaatcag

SEQ ID NO: 2136814 - DNA, 15 bp, Homo sapiens
attatgtaaatcagg

SEQ ID NO: 2136815 - DNA, 15 bp, Homo sapiens
ttatgtaaatcaggg

SEQ ID NO: 2136816 - DNA, 15 bp, Homo sapiens
tatgtaaatcagggg

SEQ ID NO: 2136817 - DNA, 15 bp, Homo sapiens
atgtaaatcaggggt

SEQ ID NO: 2136818 - DNA, 15 bp, Homo sapiens
tgtaaatcaggggtc

SEQ ID NO: 2136819 - DNA, 15 bp, Homo sapiens
gtaaatcaggggtcc

SEQ ID NO: 2136820 - DNA, 15 bp, Homo sapiens
taaatcaggggtcca

SEQ ID NO: 2136821 - DNA, 15 bp, Homo sapiens
aaatcaggggtccac

SEQ ID NO: 2136822 - DNA, 15 bp, Homo sapiens
aatcaggggtccaca

SEQ ID NO: 2136823 - DNA, 15 bp, Homo sapiens
atcaggggtccacag

SEQ ID NO: 2136824 - DNA, 15 bp, Homo sapiens
tcaggggtccacagt

SEQ ID NO: 2136825 - DNA, 15 bp, Homo sapiens
caggggtccacagtt

SEQ ID NO: 2136826 - DNA, 15 bp, Homo sapiens
aggggtccacagttt

SEQ ID NO: 2136827 - DNA, 15 bp, Homo sapiens
ggggtccacagtttt

SEQ ID NO: 2136828 - DNA, 15 bp, Homo sapiens
gggtccacagttttt

SEQ ID NO: 2136829 - DNA, 15 bp, Homo sapiens
ggtccacagtttttc

SEQ ID NO: 2136830 - DNA, 15 bp, Homo sapiens
gtccacagtttttct

SEQ ID NO: 2136831 - DNA, 15 bp, Homo sapiens
tccacagtttttctg

SEQ ID NO: 2136832 - DNA, 15 bp, Homo sapiens
ccacagtttttctgt

SEQ ID NO: 2136833 - DNA, 15 bp, Homo sapiens
cacagtttttctgta

SEQ ID NO: 2136834 - DNA, 15 bp, Homo sapiens
acagtttttctgtaa

SEQ ID NO: 2136835 - DNA, 15 bp, Homo sapiens
cagtttttctgtaag

SEQ ID NO: 2136836 - DNA, 15 bp, Homo sapiens
agtttttctgtaagg

SEQ ID NO: 2136837 - DNA, 15 bp, Homo sapiens
gtttttctgtaaggg

SEQ ID NO: 2136838 - DNA, 15 bp, Homo sapiens
tttttctgtaagggg

SEQ ID NO: 2136839 - DNA, 15 bp, Homo sapiens
ttttctgtaaggggt

SEQ ID NO: 2136840 - DNA, 15 bp, Homo sapiens
tttctgtaaggggtc

SEQ ID NO: 2136841 - DNA, 15 bp, Homo sapiens
ttctgtaaggggtca

SEQ ID NO: 2136842 - DNA, 15 bp, Homo sapiens
tctgtaaggggtcaa

SEQ ID NO: 2136843 - DNA, 15 bp, Homo sapiens
ctgtaaggggtcaaa

SEQ ID NO: 2136844 - DNA, 15 bp, Homo sapiens
tgtaaggggtcaaat

SEQ ID NO: 2136845 - DNA, 15 bp, Homo sapiens
gtaaggggtcaaatc

SEQ ID NO: 2136846 - DNA, 15 bp, Homo sapiens
taaggggtcaaatca

SEQ ID NO: 2136847 - DNA, 15 bp, Homo sapiens
aaggggtcaaatcat

SEQ ID NO: 2136848 - DNA, 15 bp, Homo sapiens
aggggtcaaatcata

SEQ ID NO: 2136849 - DNA, 15 bp, Homo sapiens
ggggtcaaatcataa

SEQ ID NO: 2136850 - DNA, 15 bp, Homo sapiens
gggtcaaatcataaa

SEQ ID NO: 2136851 - DNA, 15 bp, Homo sapiens
ggtcaaatcataaat

SEQ ID NO: 2136852 - DNA, 15 bp, Homo sapiens
gtcaaatcataaata

SEQ ID NO: 2136853 - DNA, 15 bp, Homo sapiens
tcaaatcataaatac

SEQ ID NO: 2136854 - DNA, 15 bp, Homo sapiens
caaatcataaatact

SEQ ID NO: 2136855 - DNA, 15 bp, Homo sapiens
aaatcataaatactt

SEQ ID NO: 2136856 - DNA, 15 bp, Homo sapiens
aatcataaatacttt

SEQ ID NO: 2136857 - DNA, 15 bp, Homo sapiens
atcataaatacttta

SEQ ID NO: 2136858 - DNA, 15 bp, Homo sapiens
tcataaatactttag

SEQ ID NO: 2136859 - DNA, 15 bp, Homo sapiens
cataaatactttaga

SEQ ID NO: 2136860 - DNA, 15 bp, Homo sapiens
ataaatactttagac

SEQ ID NO: 2136861 - DNA, 15 bp, Homo sapiens
taaatactttagact

SEQ ID NO: 2136862 - DNA, 15 bp, Homo sapiens
aaatactttagactg

SEQ ID NO: 2136863 - DNA, 15 bp, Homo sapiens
aatactttagactgt

SEQ ID NO: 2136864 - DNA, 15 bp, Homo sapiens
atactttagactgtg

SEQ ID NO: 2136865 - DNA, 15 bp, Homo sapiens
tactttagactgtgg

SEQ ID NO: 2136866 - DNA, 15 bp, Homo sapiens
actttagactgtggg

SEQ ID NO: 2136867 - DNA, 15 bp, Homo sapiens
ctttagactgtgggc

SEQ ID NO: 2136868 - DNA, 15 bp, Homo sapiens
tttagactgtgggcc

SEQ ID NO: 2136869 - DNA, 15 bp, Homo sapiens
ttagactgtgggcca

SEQ ID NO: 2136870 - DNA, 15 bp, Homo sapiens
tagactgtgggccat

SEQ ID NO: 2136871 - DNA, 15 bp, Homo sapiens
agactgtgggccata

SEQ ID NO: 2136872 - DNA, 15 bp, Homo sapiens
gactgtgggccatat

SEQ ID NO: 2136873 - DNA, 15 bp, Homo sapiens
actgtgggccatatg

SEQ ID NO: 2136874 - DNA, 15 bp, Homo sapiens
ctgtgggccatatgg

SEQ ID NO: 2136875 - DNA, 15 bp, Homo sapiens
tgtgggccatatggt

SEQ ID NO: 2136876 - DNA, 15 bp, Homo sapiens
gtgggccatatggtt

SEQ ID NO: 2136877 - DNA, 15 bp, Homo sapiens
tgggccatatggttt

SEQ ID NO: 2136878 - DNA, 15 bp, Homo sapiens
gggccatatggtttc

SEQ ID NO: 2136879 - DNA, 15 bp, Homo sapiens
ggccatatggtttct

SEQ ID NO: 2136880 - DNA, 15 bp, Homo sapiens
gccatatggtttctg

SEQ ID NO: 2136881 - DNA, 15 bp, Homo sapiens
ccatatggtttctgt

SEQ ID NO: 2136882 - DNA, 15 bp, Homo sapiens
catatggtttctgtt

SEQ ID NO: 2136883 - DNA, 15 bp, Homo sapiens
atatggtttctgtta

SEQ ID NO: 2136884 - DNA, 15 bp, Homo sapiens
tatggtttctgttac

SEQ ID NO: 2136885 - DNA, 15 bp, Homo sapiens
atggtttctgttaca

SEQ ID NO: 2136886 - DNA, 15 bp, Homo sapiens
tggtttctgttacat

SEQ ID NO: 2136887 - DNA, 15 bp, Homo sapiens
ggtttctgttacata

SEQ ID NO: 2136888 - DNA, 15 bp, Homo sapiens
gtttctgttacatat

SEQ ID NO: 2136889 - DNA, 15 bp, Homo sapiens
tttctgttacatatt

SEQ ID NO: 2136890 - DNA, 15 bp, Homo sapiens
ttctgttacatattt

SEQ ID NO: 2136891 - DNA, 15 bp, Homo sapiens
tctgttacatatttg

SEQ ID NO: 2136892 - DNA, 15 bp, Homo sapiens
ctgttacatatttgt

SEQ ID NO: 2136893 - DNA, 15 bp, Homo sapiens
tgttacatatttgtt

SEQ ID NO: 2136894 - DNA, 15 bp, Homo sapiens
gttacatatttgttt

SEQ ID NO: 2136895 - DNA, 15 bp, Homo sapiens
ttacatatttgtttt

SEQ ID NO: 2136896 - DNA, 15 bp, Homo sapiens
tacatatttgttttt

SEQ ID NO: 2136897 - DNA, 15 bp, Homo sapiens
acatatttgtttttt

SEQ ID NO: 2136898 - DNA, 15 bp, Homo sapiens
catatttgtttttta

SEQ ID NO: 2136899 - DNA, 15 bp, Homo sapiens
atatttgttttttaa

SEQ ID NO: 2136900 - DNA, 15 bp, Homo sapiens
tatttgttttttaaa

SEQ ID NO: 2136901 - DNA, 15 bp, Homo sapiens
atttgttttttaaac

SEQ ID NO: 2136902 - DNA, 15 bp, Homo sapiens
tttgttttttaaaca

SEQ ID NO: 2136903 - DNA, 15 bp, Homo sapiens
ttgttttttaaacaa

SEQ ID NO: 2136904 - DNA, 15 bp, Homo sapiens
tgttttttaaacaac

SEQ ID NO: 2136905 - DNA, 15 bp, Homo sapiens
gttttttaaacaacg

SEQ ID NO: 2136906 - DNA, 15 bp, Homo sapiens
ttttttaaacaacgt

SEQ ID NO: 2136907 - DNA, 15 bp, Homo sapiens
tttttaaacaacgtt

SEQ ID NO: 2136908 - DNA, 15 bp, Homo sapiens
ttttaaacaacgttt

SEQ ID NO: 2136909 - DNA, 15 bp, Homo sapiens
tttaaacaacgtttt

SEQ ID NO: 2136910 - DNA, 15 bp, Homo sapiens
ttaaacaacgttttt

SEQ ID NO: 2136911 - DNA, 15 bp, Homo sapiens
taaacaacgttttta

SEQ ID NO: 2136912 - DNA, 15 bp, Homo sapiens
aaacaacgtttttat

SEQ ID NO: 2136913 - DNA, 15 bp, Homo sapiens
aacaacgtttttata

SEQ ID NO: 2136914 - DNA, 15 bp, Homo sapiens
acaacgtttttataa

SEQ ID NO: 2136915 - DNA, 15 bp, Homo sapiens
caacgtttttataag

SEQ ID NO: 2136916 - DNA, 15 bp, Homo sapiens
aacgtttttataagg

SEQ ID NO: 2136917 - DNA, 15 bp, Homo sapiens
acgtttttataaggt

SEQ ID NO: 2136918 - DNA, 15 bp, Homo sapiens
cgtttttataaggtc

SEQ ID NO: 2136919 - DNA, 15 bp, Homo sapiens
gtttttataaggtca

SEQ ID NO: 2136920 - DNA, 15 bp, Homo sapiens
tttttataaggtcaa

SEQ ID NO: 2136921 - DNA, 15 bp, Homo sapiens
ttttataaggtcaaa

SEQ ID NO: 2136922 - DNA, 15 bp, Homo sapiens
tttataaggtcaaaa

SEQ ID NO: 2136923 - DNA, 15 bp, Homo sapiens
ttataaggtcaaaat

SEQ ID NO: 2136924 - DNA, 15 bp, Homo sapiens
tataaggtcaaaatc

SEQ ID NO: 2136925 - DNA, 15 bp, Homo sapiens
ataaggtcaaaatca

SEQ ID NO: 2136926 - DNA, 15 bp, Homo sapiens
taaggtcaaaatcat

SEQ ID NO: 2136927 - DNA, 15 bp, Homo sapiens
aaggtcaaaatcatt

SEQ ID NO: 2136928 - DNA, 15 bp, Homo sapiens
aggtcaaaatcattc

SEQ ID NO: 2136929 - DNA, 15 bp, Homo sapiens
ggtcaaaatcattct

SEQ ID NO: 2136930 - DNA, 15 bp, Homo sapiens
gtcaaaatcattctt

SEQ ID NO: 2136931 - DNA, 15 bp, Homo sapiens
tcaaaatcattctta

SEQ ID NO: 2136932 - DNA, 15 bp, Homo sapiens
caaaatcattcttag

SEQ ID NO: 2136933 - DNA, 15 bp, Homo sapiens
aaaatcattcttagt

SEQ ID NO: 2136934 - DNA, 15 bp, Homo sapiens
aaatcattcttagtt

SEQ ID NO: 2136935 - DNA, 15 bp, Homo sapiens
aatcattcttagttt

SEQ ID NO: 2136936 - DNA, 15 bp, Homo sapiens
atcattcttagtttt

SEQ ID NO: 2136937 - DNA, 15 bp, Homo sapiens
tcattcttagttttt

SEQ ID NO: 2136938 - DNA, 15 bp, Homo sapiens
cattcttagtttttg

SEQ ID NO: 2136939 - DNA, 15 bp, Homo sapiens
attcttagtttttga

SEQ ID NO: 2136940 - DNA, 15 bp, Homo sapiens
ttcttagtttttgag

SEQ ID NO: 2136941 - DNA, 15 bp, Homo sapiens
tcttagtttttgagc

SEQ ID NO: 2136942 - DNA, 15 bp, Homo sapiens
cttagtttttgagcc

SEQ ID NO: 2136943 - DNA, 15 bp, Homo sapiens
ttagtttttgagcca

SEQ ID NO: 2136944 - DNA, 15 bp, Homo sapiens
tagtttttgagccaa

SEQ ID NO: 2136945 - DNA, 15 bp, Homo sapiens
agtttttgagccaat

SEQ ID NO: 2136946 - DNA, 15 bp, Homo sapiens
gtttttgagccaatt

SEQ ID NO: 2136947 - DNA, 15 bp, Homo sapiens
tttttgagccaattg

SEQ ID NO: 2136948 - DNA, 15 bp, Homo sapiens
ttttgagccaattgg

SEQ ID NO: 2136949 - DNA, 15 bp, Homo sapiens
tttgagccaattgga

SEQ ID NO: 2136950 - DNA, 15 bp, Homo sapiens
ttgagccaattggat

SEQ ID NO: 2136951 - DNA, 15 bp, Homo sapiens
tgagccaattggatt

SEQ ID NO: 2136952 - DNA, 15 bp, Homo sapiens
gagccaattggattt

SEQ ID NO: 2136953 - DNA, 15 bp, Homo sapiens
agccaattggatttg

SEQ ID NO: 2136954 - DNA, 15 bp, Homo sapiens
gccaattggatttgg

SEQ ID NO: 2136955 - DNA, 15 bp, Homo sapiens
ccaattggatttggc

SEQ ID NO: 2136956 - DNA, 15 bp, Homo sapiens
caattggatttggcc

SEQ ID NO: 2136957 - DNA, 15 bp, Homo sapiens
aattggatttggcct

SEQ ID NO: 2136958 - DNA, 15 bp, Homo sapiens
attggatttggcctg

SEQ ID NO: 2136959 - DNA, 15 bp, Homo sapiens
ttggatttggcctgc

SEQ ID NO: 2136960 - DNA, 15 bp, Homo sapiens
tggatttggcctgct

SEQ ID NO: 2136961 - DNA, 15 bp, Homo sapiens
ggatttggcctgctg

SEQ ID NO: 2136962 - DNA, 15 bp, Homo sapiens
gatttggcctgctgt

SEQ ID NO: 2136963 - DNA, 15 bp, Homo sapiens
atttggcctgctgtt

SEQ ID NO: 2136964 - DNA, 15 bp, Homo sapiens
tttggcctgctgttc

SEQ ID NO: 2136965 - DNA, 15 bp, Homo sapiens
ttggcctgctgttca

SEQ ID NO: 2136966 - DNA, 15 bp, Homo sapiens
tggcctgctgttcat

SEQ ID NO: 2136967 - DNA, 15 bp, Homo sapiens
ggcctgctgttcata

SEQ ID NO: 2136968 - DNA, 15 bp, Homo sapiens
gcctgctgttcatag

SEQ ID NO: 2136969 - DNA, 15 bp, Homo sapiens
cctgctgttcatagc

SEQ ID NO: 2136970 - DNA, 15 bp, Homo sapiens
ctgctgttcatagct

SEQ ID NO: 2136971 - DNA, 15 bp, Homo sapiens
tgctgttcatagctt

SEQ ID NO: 2136972 - DNA, 15 bp, Homo sapiens
gctgttcatagctta

SEQ ID NO: 2136973 - DNA, 15 bp, Homo sapiens
ctgttcatagcttac

SEQ ID NO: 2136974 - DNA, 15 bp, Homo sapiens
tgttcatagcttacc

SEQ ID NO: 2136975 - DNA, 15 bp, Homo sapiens
gttcatagcttacca

SEQ ID NO: 2136976 - DNA, 15 bp, Homo sapiens
ttcatagcttaccac

SEQ ID NO: 2136977 - DNA, 15 bp, Homo sapiens
tcatagcttaccacc

SEQ ID NO: 2136978 - DNA, 15 bp, Homo sapiens
catagcttaccaccc

SEQ ID NO: 2136979 - DNA, 15 bp, Homo sapiens
atagcttaccacccc

SEQ ID NO: 2136980 - DNA, 15 bp, Homo sapiens
tagcttaccaccccc

SEQ ID NO: 2136981 - DNA, 15 bp, Homo sapiens
agcttaccaccccct

SEQ ID NO: 2136982 - DNA, 15 bp, Homo sapiens
gcttaccaccccctg

SEQ ID NO: 2136983 - DNA, 15 bp, Homo sapiens
cttaccaccccctga

SEQ ID NO: 2136984 - DNA, 15 bp, Homo sapiens
ttaccaccccctgat

SEQ ID NO: 2136985 - DNA, 15 bp, Homo sapiens
taccaccccctgatg

SEQ ID NO: 2136986 - DNA, 15 bp, Homo sapiens
accaccccctgatgt

SEQ ID NO: 2136987 - DNA, 15 bp, Homo sapiens
ccaccccctgatgta

SEQ ID NO: 2136988 - DNA, 15 bp, Homo sapiens
caccccctgatgtat

SEQ ID NO: 2136989 - DNA, 15 bp, Homo sapiens
accccctgatgtatt

SEQ ID NO: 2136990 - DNA, 15 bp, Homo sapiens
ccccctgatgtatta

SEQ ID NO: 2136991 - DNA, 15 bp, Homo sapiens
cccctgatgtattat

SEQ ID NO: 2136992 - DNA, 15 bp, Homo sapiens
ccctgatgtattatt

SEQ ID NO: 2136993 - DNA, 15 bp, Homo sapiens
cctgatgtattattt

SEQ ID NO: 2136994 - DNA, 15 bp, Homo sapiens
ctgatgtattatttg

SEQ ID NO: 2136995 - DNA, 15 bp, Homo sapiens
tgatgtattatttgt

SEQ ID NO: 2136996 - DNA, 15 bp, Homo sapiens
gatgtattatttgtt

SEQ ID NO: 2136997 - DNA, 15 bp, Homo sapiens
atgtattatttgtta

SEQ ID NO: 2136998 - DNA, 15 bp, Homo sapiens
tgtattatttgttat

SEQ ID NO: 2136999 - DNA, 15 bp, Homo sapiens
gtattatttgttatt

SEQ ID NO: 2137000 - DNA, 15 bp, Homo sapiens
tattatttgttattc

SEQ ID NO: 2137001 - DNA, 15 bp, Homo sapiens
attatttgttattca

SEQ ID NO: 2137002 - DNA, 15 bp, Homo sapiens
ttatttgttattcag

SEQ ID NO: 2137003 - DNA, 15 bp, Homo sapiens
tatttgttattcaga

SEQ ID NO: 2137004 - DNA, 15 bp, Homo sapiens
atttgttattcagag

SEQ ID NO: 2137005 - DNA, 15 bp, Homo sapiens
tttgttattcagaga

SEQ ID NO: 2137006 - DNA, 15 bp, Homo sapiens
ttgttattcagagaa

SEQ ID NO: 2137007 - DNA, 15 bp, Homo sapiens
tgttattcagagaaa

SEQ ID NO: 2137008 - DNA, 15 bp, Homo sapiens
gttattcagagaaaa

SEQ ID NO: 2137009 - DNA, 15 bp, Homo sapiens
ttattcagagaaaat

SEQ ID NO: 2137010 - DNA, 15 bp, Homo sapiens
tattcagagaaaatt

SEQ ID NO: 2137011 - DNA, 15 bp, Homo sapiens
attcagagaaaattt

SEQ ID NO: 2137012 - DNA, 15 bp, Homo sapiens
ttcagagaaaatttc

SEQ ID NO: 2137013 - DNA, 15 bp, Homo sapiens
tcagagaaaatttct

SEQ ID NO: 2137014 - DNA, 15 bp, Homo sapiens
cagagaaaatttctg

SEQ ID NO: 2137015 - DNA, 15 bp, Homo sapiens
agagaaaatttctga

SEQ ID NO: 2137016 - DNA, 15 bp, Homo sapiens
gagaaaatttctgaa

SEQ ID NO: 2137017 - DNA, 15 bp, Homo sapiens
agaaaatttctgaat

SEQ ID NO: 2137018 - DNA, 15 bp, Homo sapiens
gaaaatttctgaata

SEQ ID NO: 2137019 - DNA, 15 bp, Homo sapiens
aaaatttctgaatac

SEQ ID NO: 2137020 - DNA, 15 bp, Homo sapiens
aaatttctgaatact

SEQ ID NO: 2137021 - DNA, 15 bp, Homo sapiens
aatttctgaatacta

SEQ ID NO: 2137022 - DNA, 15 bp, Homo sapiens
atttctgaatactac

SEQ ID NO: 2137023 - DNA, 15 bp, Homo sapiens
tttctgaatactact

SEQ ID NO: 2137024 - DNA, 15 bp, Homo sapiens
ttctgaatactacta

SEQ ID NO: 2137025 - DNA, 15 bp, Homo sapiens
tctgaatactactag

SEQ ID NO: 2137026 - DNA, 15 bp, Homo sapiens
ctgaatactactagt

SEQ ID NO: 2137027 - DNA, 15 bp, Homo sapiens
tgaatactactagtt

SEQ ID NO: 2137028 - DNA, 15 bp, Homo sapiens
gaatactactagttt

SEQ ID NO: 2137029 - DNA, 15 bp, Homo sapiens
aatactactagtttc

SEQ ID NO: 2137030 - DNA, 15 bp, Homo sapiens
atactactagtttcc

SEQ ID NO: 2137031 - DNA, 15 bp, Homo sapiens
tactactagtttcct

SEQ ID NO: 2137032 - DNA, 15 bp, Homo sapiens
actactagtttcctt

SEQ ID NO: 2137033 - DNA, 15 bp, Homo sapiens
ctactagtttccttt

SEQ ID NO: 2137034 - DNA, 15 bp, Homo sapiens
tactagtttcctttt

SEQ ID NO: 2137035 - DNA, 15 bp, Homo sapiens
actagtttccttttc

SEQ ID NO: 2137036 - DNA, 15 bp, Homo sapiens
ctagtttccttttct

SEQ ID NO: 2137037 - DNA, 15 bp, Homo sapiens
tagtttccttttctg

SEQ ID NO: 2137038 - DNA, 15 bp, Homo sapiens
agtttccttttctgt

SEQ ID NO: 2137039 - DNA, 15 bp, Homo sapiens
gtttccttttctgtg

SEQ ID NO: 2137040 - DNA, 15 bp, Homo sapiens
tttccttttctgtgc

SEQ ID NO: 2137041 - DNA, 15 bp, Homo sapiens
ttccttttctgtgcc

SEQ ID NO: 2137042 - DNA, 15 bp, Homo sapiens
tccttttctgtgcct

SEQ ID NO: 2137043 - DNA, 15 bp, Homo sapiens
ccttttctgtgcctg

SEQ ID NO: 2137044 - DNA, 15 bp, Homo sapiens
cttttctgtgcctgt

SEQ ID NO: 2137045 - DNA, 15 bp, Homo sapiens
ttttctgtgcctgtc

SEQ ID NO: 2137046 - DNA, 15 bp, Homo sapiens
tttctgtgcctgtcc

SEQ ID NO: 2137047 - DNA, 15 bp, Homo sapiens
ttctgtgcctgtccc

SEQ ID NO: 2137048 - DNA, 15 bp, Homo sapiens
tctgtgcctgtccct

SEQ ID NO: 2137049 - DNA, 15 bp, Homo sapiens
ctgtgcctgtccctg

SEQ ID NO: 2137050 - DNA, 15 bp, Homo sapiens
tgtgcctgtccctgt

SEQ ID NO: 2137051 - DNA, 15 bp, Homo sapiens
gtgcctgtccctgtg

SEQ ID NO: 2137052 - DNA, 15 bp, Homo sapiens
tgcctgtccctgtgc

SEQ ID NO: 2137053 - DNA, 15 bp, Homo sapiens
gcctgtccctgtgct

SEQ ID NO: 2137054 - DNA, 15 bp, Homo sapiens
cctgtccctgtgcta

SEQ ID NO: 2137055 - DNA, 15 bp, Homo sapiens
ctgtccctgtgctag

SEQ ID NO: 2137056 - DNA, 15 bp, Homo sapiens
tgtccctgtgctagg

SEQ ID NO: 2137057 - DNA, 15 bp, Homo sapiens
gtccctgtgctaggc

SEQ ID NO: 2137058 - DNA, 15 bp, Homo sapiens
tccctgtgctaggca

SEQ ID NO: 2137059 - DNA, 15 bp, Homo sapiens
cctgtgctaggcact

SEQ ID NO: 2137060 - DNA, 15 bp, Homo sapiens
ctgtgctaggcacta

SEQ ID NO: 2137061 - DNA, 15 bp, Homo sapiens
tgtgctaggcactaa

SEQ ID NO: 2137062 - DNA, 15 bp, Homo sapiens
gtgctaggcactaaa

SEQ ID NO: 2137063 - DNA, 15 bp, Homo sapiens
tgctaggcactaaaa

SEQ ID NO: 2137064 - DNA, 15 bp, Homo sapiens
gctaggcactaaaaa

SEQ ID NO: 2137065 - DNA, 15 bp, Homo sapiens
ctaggcactaaaaat

SEQ ID NO: 2137066 - DNA, 15 bp, Homo sapiens
taggcactaaaaatg

SEQ ID NO: 2137067 - DNA, 15 bp, Homo sapiens
aggcactaaaaatgc

SEQ ID NO: 2137068 - DNA, 15 bp, Homo sapiens
ggcactaaaaatgca

SEQ ID NO: 2137069 - DNA, 15 bp, Homo sapiens
gcactaaaaatgcaa

SEQ ID NO: 2137070 - DNA, 15 bp, Homo sapiens
cactaaaaatgcaat

SEQ ID NO: 2137071 - DNA, 15 bp, Homo sapiens
actaaaaatgcaatg

SEQ ID NO: 2137072 - DNA, 15 bp, Homo sapiens
ctaaaaatgcaatga

SEQ ID NO: 2137073 - DNA, 15 bp, Homo sapiens
taaaaatgcaatgat

SEQ ID NO: 2137074 - DNA, 15 bp, Homo sapiens
aaaaatgcaatgatt

SEQ ID NO: 2137075 - DNA, 15 bp, Homo sapiens
aaaatgcaatgatta

SEQ ID NO: 2137076 - DNA, 15 bp, Homo sapiens
aaatgcaatgattat

SEQ ID NO: 2137077 - DNA, 15 bp, Homo sapiens
aatgcaatgattatt

SEQ ID NO: 2137078 - DNA, 15 bp, Homo sapiens
atgcaatgattattg

SEQ ID NO: 2137079 - DNA, 15 bp, Homo sapiens
tgcaatgattattga

SEQ ID NO: 2137080 - DNA, 15 bp, Homo sapiens
gcaatgattattgat

SEQ ID NO: 2137081 - DNA, 15 bp, Homo sapiens
caatgattattgata

SEQ ID NO: 2137082 - DNA, 15 bp, Homo sapiens
aatgattattgatat

SEQ ID NO: 2137083 - DNA, 15 bp, Homo sapiens
atgattattgatatc

SEQ ID NO: 2137084 - DNA, 15 bp, Homo sapiens
tgattattgatatct

SEQ ID NO: 2137085 - DNA, 15 bp, Homo sapiens
gattattgatatcta

SEQ ID NO: 2137086 - DNA, 15 bp, Homo sapiens
attattgatatctag

SEQ ID NO: 2137087 - DNA, 15 bp, Homo sapiens
ttattgatatctagg

SEQ ID NO: 2137088 - DNA, 15 bp, Homo sapiens
tattgatatctaggt

SEQ ID NO: 2137089 - DNA, 15 bp, Homo sapiens
attgatatctaggtg

SEQ ID NO: 2137090 - DNA, 15 bp, Homo sapiens
ttgatatctaggtga

SEQ ID NO: 2137091 - DNA, 15 bp, Homo sapiens
tgatatctaggtgac

SEQ ID NO: 2137092 - DNA, 15 bp, Homo sapiens
gatatctaggtgacc

SEQ ID NO: 2137093 - DNA, 15 bp, Homo sapiens
atatctaggtgacct

SEQ ID NO: 2137094 - DNA, 15 bp, Homo sapiens
tatctaggtgacctg

SEQ ID NO: 2137095 - DNA, 15 bp, Homo sapiens
atctaggtgacctga

SEQ ID NO: 2137096 - DNA, 15 bp, Homo sapiens
tctaggtgacctgaa

SEQ ID NO: 2137097 - DNA, 15 bp, Homo sapiens
ctaggtgacctgaaa

SEQ ID NO: 2137098 - DNA, 15 bp, Homo sapiens
taggtgacctgaaaa

SEQ ID NO: 2137099 - DNA, 15 bp, Homo sapiens
aggtgacctgaaaaa

SEQ ID NO: 2137100 - DNA, 15 bp, Homo sapiens
ggtgacctgaaaaaa

SEQ ID NO: 2137101 - DNA, 15 bp, Homo sapiens
gtgacctgaaaaaaa

SEQ ID NO: 2137102 - DNA, 15 bp, Homo sapiens
tgacctgaaaaaaaa

SEQ ID NO: 2137103 - DNA, 15 bp, Homo sapiens
gacctgaaaaaaaat

SEQ ID NO: 2137104 - DNA, 15 bp, Homo sapiens
acctgaaaaaaaata

SEQ ID NO: 2137105 - DNA, 15 bp, Homo sapiens
cctgaaaaaaaatag

SEQ ID NO: 2137106 - DNA, 15 bp, Homo sapiens
ctgaaaaaaaatagt

SEQ ID NO: 2137107 - DNA, 15 bp, Homo sapiens
tgaaaaaaaatagtg

SEQ ID NO: 2137108 - DNA, 15 bp, Homo sapiens
gaaaaaaaatagtga

SEQ ID NO: 2137109 - DNA, 15 bp, Homo sapiens
aaaaaaaatagtgaa

SEQ ID NO: 2137110 - DNA, 15 bp, Homo sapiens
aaaaaaatagtgaat

SEQ ID NO: 2137111 - DNA, 15 bp, Homo sapiens
aaaaaatagtgaatg

SEQ ID NO: 2137112 - DNA, 15 bp, Homo sapiens
aaaaatagtgaatgt

SEQ ID NO: 2137113 - DNA, 15 bp, Homo sapiens
aaaatagtgaatgtg

SEQ ID NO: 2137114 - DNA, 15 bp, Homo sapiens
aaatagtgaatgtgc

SEQ ID NO: 2137115 - DNA, 15 bp, Homo sapiens
aatagtgaatgtgct

SEQ ID NO: 2137116 - DNA, 15 bp, Homo sapiens
atagtgaatgtgctt

SEQ ID NO: 2137117 - DNA, 15 bp, Homo sapiens
tagtgaatgtgcttt

SEQ ID NO: 2137118 - DNA, 15 bp, Homo sapiens
agtgaatgtgctttg

SEQ ID NO: 2137119 - DNA, 15 bp, Homo sapiens
gtgaatgtgctttgt

SEQ ID NO: 2137120 - DNA, 15 bp, Homo sapiens
tgaatgtgctttgta

SEQ ID NO: 2137121 - DNA, 15 bp, Homo sapiens
gaatgtgctttgtaa

SEQ ID NO: 2137122 - DNA, 15 bp, Homo sapiens
aatgtgctttgtaaa

SEQ ID NO: 2137123 - DNA, 15 bp, Homo sapiens
atgtgctttgtaaac

SEQ ID NO: 2137124 - DNA, 15 bp, Homo sapiens
tgtgctttgtaaact

SEQ ID NO: 2137125 - DNA, 15 bp, Homo sapiens
gtgctttgtaaactg

SEQ ID NO: 2137126 - DNA, 15 bp, Homo sapiens
tgctttgtaaactgt

SEQ ID NO: 2137127 - DNA, 15 bp, Homo sapiens
gctttgtaaactgta

SEQ ID NO: 2137128 - DNA, 15 bp, Homo sapiens
ctttgtaaactgtaa

SEQ ID NO: 2137129 - DNA, 15 bp, Homo sapiens
tttgtaaactgtaaa

SEQ ID NO: 2137130 - DNA, 15 bp, Homo sapiens
ttgtaaactgtaaag

SEQ ID NO: 2137131 - DNA, 15 bp, Homo sapiens
tgtaaactgtaaagc

SEQ ID NO: 2137132 - DNA, 15 bp, Homo sapiens
gtaaactgtaaagca

SEQ ID NO: 2137133 - DNA, 15 bp, Homo sapiens
taaactgtaaagcac

SEQ ID NO: 2137134 - DNA, 15 bp, Homo sapiens
aaactgtaaagcact

SEQ ID NO: 2137135 - DNA, 15 bp, Homo sapiens
aactgtaaagcactt

SEQ ID NO: 2137136 - DNA, 15 bp, Homo sapiens
actgtaaagcacttg

SEQ ID NO: 2137137 - DNA, 15 bp, Homo sapiens
ctgtaaagcacttgt

SEQ ID NO: 2137138 - DNA, 15 bp, Homo sapiens
tgtaaagcacttgta

SEQ ID NO: 2137139 - DNA, 15 bp, Homo sapiens
gtaaagcacttgtat

SEQ ID NO: 2137140 - DNA, 15 bp, Homo sapiens
taaagcacttgtatt

SEQ ID NO: 2137141 - DNA, 15 bp, Homo sapiens
aaagcacttgtattc

SEQ ID NO: 2137142 - DNA, 15 bp, Homo sapiens
aagcacttgtattct

SEQ ID NO: 2137143 - DNA, 15 bp, Homo sapiens
agcacttgtattcta

SEQ ID NO: 2137144 - DNA, 15 bp, Homo sapiens
gcacttgtattctac

SEQ ID NO: 2137145 - DNA, 15 bp, Homo sapiens
cacttgtattctact

SEQ ID NO: 2137146 - DNA, 15 bp, Homo sapiens
acttgtattctactg

SEQ ID NO: 2137147 - DNA, 15 bp, Homo sapiens
cttgtattctactgt

SEQ ID NO: 2137148 - DNA, 15 bp, Homo sapiens
ttgtattctactgtg

SEQ ID NO: 2137149 - DNA, 15 bp, Homo sapiens
tgtattctactgtga

SEQ ID NO: 2137150 - DNA, 15 bp, Homo sapiens
gtattctactgtgat

SEQ ID NO: 2137151 - DNA, 15 bp, Homo sapiens
tattctactgtgata

SEQ ID NO: 2137152 - DNA, 15 bp, Homo sapiens
attctactgtgataa

SEQ ID NO: 2137153 - DNA, 15 bp, Homo sapiens
ttctactgtgataag

SEQ ID NO: 2137154 - DNA, 15 bp, Homo sapiens
tctactgtgataagc

SEQ ID NO: 2137155 - DNA, 15 bp, Homo sapiens
ctactgtgataagcg

SEQ ID NO: 2137156 - DNA, 15 bp, Homo sapiens
tactgtgataagcgt

SEQ ID NO: 2137157 - DNA, 15 bp, Homo sapiens
actgtgataagcgtt

SEQ ID NO: 2137158 - DNA, 15 bp, Homo sapiens
ctgtgataagcgttg

SEQ ID NO: 2137159 - DNA, 15 bp, Homo sapiens
tgtgataagcgttgt

SEQ ID NO: 2137160 - DNA, 15 bp, Homo sapiens
gtgataagcgttgtg

SEQ ID NO: 2137161 - DNA, 15 bp, Homo sapiens
tgataagcgttgtgg

SEQ ID NO: 2137162 - DNA, 15 bp, Homo sapiens
gataagcgttgtgga

SEQ ID NO: 2137163 - DNA, 15 bp, Homo sapiens
ataagcgttgtggat

SEQ ID NO: 2137164 - DNA, 15 bp, Homo sapiens
taagcgttgtggata

SEQ ID NO: 2137165 - DNA, 15 bp, Homo sapiens
aagcgttgtggatac

SEQ ID NO: 2137166 - DNA, 15 bp, Homo sapiens
agcgttgtggataca

SEQ ID NO: 2137167 - DNA, 15 bp, Homo sapiens
gcgttgtggatacaa

SEQ ID NO: 2137168 - DNA, 15 bp, Homo sapiens
cgttgtggatacaaa

SEQ ID NO: 2137169 - DNA, 15 bp, Homo sapiens
gttgtggatacaaag

SEQ ID NO: 2137170 - DNA, 15 bp, Homo sapiens
ttgtggatacaaaga

SEQ ID NO: 2137171 - DNA, 15 bp, Homo sapiens
tgtggatacaaagaa

SEQ ID NO: 2137172 - DNA, 15 bp, Homo sapiens
accagctattttggg

SEQ ID NO: 2137173 - DNA, 15 bp, Homo sapiens
ccagctattttgggt

SEQ ID NO: 2137174 - DNA, 15 bp, Homo sapiens
cagctattttgggta

SEQ ID NO: 2137175 - DNA, 15 bp, Homo sapiens
agctattttgggtac

SEQ ID NO: 2137176 - DNA, 15 bp, Homo sapiens
gctattttgggtact

SEQ ID NO: 2137177 - DNA, 15 bp, Homo sapiens
ctattttgggtactg

SEQ ID NO: 2137178 - DNA, 15 bp, Homo sapiens
tattttgggtactgt

SEQ ID NO: 2137179 - DNA, 15 bp, Homo sapiens
attttgggtactgta

SEQ ID NO: 2137180 - DNA, 15 bp, Homo sapiens
ttttgggtactgtaa

SEQ ID NO: 2137181 - DNA, 15 bp, Homo sapiens
tttgggtactgtaaa

SEQ ID NO: 2137182 - DNA, 15 bp, Homo sapiens
ttgggtactgtaaaa

SEQ ID NO: 2137183 - DNA, 15 bp, Homo sapiens
tgggtactgtaaaat

SEQ ID NO: 2137184 - DNA, 15 bp, Homo sapiens
gggtactgtaaaata

SEQ ID NO: 2137185 - DNA, 15 bp, Homo sapiens
ggtactgtaaaatac

SEQ ID NO: 2137186 - DNA, 15 bp, Homo sapiens
gtactgtaaaataca

SEQ ID NO: 2137187 - DNA, 15 bp, Homo sapiens
tactgtaaaatacaa

SEQ ID NO: 2137188 - DNA, 15 bp, Homo sapiens
actgtaaaatacaag

SEQ ID NO: 2137189 - DNA, 15 bp, Homo sapiens
ctgtaaaatacaaga

SEQ ID NO: 2137190 - DNA, 15 bp, Homo sapiens
tgtaaaatacaagat

SEQ ID NO: 2137191 - DNA, 15 bp, Homo sapiens
gtaaaatacaagatt

SEQ ID NO: 2137192 - DNA, 15 bp, Homo sapiens
taaaatacaagatta

SEQ ID NO: 2137193 - DNA, 15 bp, Homo sapiens
aaaatacaagattaa

SEQ ID NO: 2137194 - DNA, 15 bp, Homo sapiens
aaatacaagattaat

SEQ ID NO: 2137195 - DNA, 15 bp, Homo sapiens
aatacaagattaatt

SEQ ID NO: 2137196 - DNA, 15 bp, Homo sapiens
atacaagattaattc

SEQ ID NO: 2137197 - DNA, 15 bp, Homo sapiens
tacaagattaattct

SEQ ID NO: 2137198 - DNA, 15 bp, Homo sapiens
acaagattaattctc

SEQ ID NO: 2137199 - DNA, 15 bp, Homo sapiens
caagattaattctcc

SEQ ID NO: 2137200 - DNA, 15 bp, Homo sapiens
aagattaattctcct

SEQ ID NO: 2137201 - DNA, 15 bp, Homo sapiens
agattaattctccta

SEQ ID NO: 2137202 - DNA, 15 bp, Homo sapiens
gattaattctcctat

SEQ ID NO: 2137203 - DNA, 15 bp, Homo sapiens
attaattctcctatg

SEQ ID NO: 2137204 - DNA, 15 bp, Homo sapiens
ttaattctcctatgt

SEQ ID NO: 2137205 - DNA, 15 bp, Homo sapiens
taattctcctatgta

SEQ ID NO: 2137206 - DNA, 15 bp, Homo sapiens
aattctcctatgtaa

SEQ ID NO: 2137207 - DNA, 15 bp, Homo sapiens
attctcctatgtaat

SEQ ID NO: 2137208 - DNA, 15 bp, Homo sapiens
ttctcctatgtaata

SEQ ID NO: 2137209 - DNA, 15 bp, Homo sapiens
tctcctatgtaataa

SEQ ID NO: 2137210 - DNA, 15 bp, Homo sapiens
ctcctatgtaataag

SEQ ID NO: 2137211 - DNA, 15 bp, Homo sapiens
tcctatgtaataaga

SEQ ID NO: 2137212 - DNA, 15 bp, Homo sapiens
cctatgtaataagag

SEQ ID NO: 2137213 - DNA, 15 bp, Homo sapiens
ctatgtaataagagg

SEQ ID NO: 2137214 - DNA, 15 bp, Homo sapiens
tatgtaataagagga

SEQ ID NO: 2137215 - DNA, 15 bp, Homo sapiens
atgtaataagaggaa

SEQ ID NO: 2137216 - DNA, 15 bp, Homo sapiens
tgtaataagaggaaa

SEQ ID NO: 2137217 - DNA, 15 bp, Homo sapiens
gtaataagaggaaag

SEQ ID NO: 2137218 - DNA, 15 bp, Homo sapiens
taataagaggaaagt

SEQ ID NO: 2137219 - DNA, 15 bp, Homo sapiens
aataagaggaaagtt

SEQ ID NO: 2137220 - DNA, 15 bp, Homo sapiens
ataagaggaaagttt

SEQ ID NO: 2137221 - DNA, 15 bp, Homo sapiens
taagaggaaagttta

SEQ ID NO: 2137222 - DNA, 15 bp, Homo sapiens
aagaggaaagtttat

SEQ ID NO: 2137223 - DNA, 15 bp, Homo sapiens
agaggaaagtttatc

SEQ ID NO: 2137224 - DNA, 15 bp, Homo sapiens
gaggaaagtttatcc

SEQ ID NO: 2137225 - DNA, 15 bp, Homo sapiens
aggaaagtttatcct

SEQ ID NO: 2137226 - DNA, 15 bp, Homo sapiens
ggaaagtttatcctc

SEQ ID NO: 2137227 - DNA, 15 bp, Homo sapiens
gaaagtttatcctct

SEQ ID NO: 2137228 - DNA, 15 bp, Homo sapiens
aaagtttatcctcta

SEQ ID NO: 2137229 - DNA, 15 bp, Homo sapiens
aagtttatcctctat

SEQ ID NO: 2137230 - DNA, 15 bp, Homo sapiens
agtttatcctctata

SEQ ID NO: 2137231 - DNA, 15 bp, Homo sapiens
gtttatcctctatac

SEQ ID NO: 2137232 - DNA, 15 bp, Homo sapiens
tttatcctctatact

SEQ ID NO: 2137233 - DNA, 15 bp, Homo sapiens
ttatcctctatacta

SEQ ID NO: 2137234 - DNA, 15 bp, Homo sapiens
tatcctctatactat

SEQ ID NO: 2137235 - DNA, 15 bp, Homo sapiens
atcctctatactatt

SEQ ID NO: 2137236 - DNA, 15 bp, Homo sapiens
tcctctatactattc

SEQ ID NO: 2137237 - DNA, 15 bp, Homo sapiens
cctctatactattca

SEQ ID NO: 2137238 - DNA, 15 bp, Homo sapiens
ctctatactattcag

SEQ ID NO: 2137239 - DNA, 15 bp, Homo sapiens
tctatactattcaga

SEQ ID NO: 2137240 - DNA, 15 bp, Homo sapiens
ctatactattcagat

SEQ ID NO: 2137241 - DNA, 15 bp, Homo sapiens
tatactattcagatg

SEQ ID NO: 2137242 - DNA, 15 bp, Homo sapiens
atactattcagatgt

SEQ ID NO: 2137243 - DNA, 15 bp, Homo sapiens
tactattcagatgta

SEQ ID NO: 2137244 - DNA, 15 bp, Homo sapiens
actattcagatgtaa

SEQ ID NO: 2137245 - DNA, 15 bp, Homo sapiens
ctattcagatgtaag

SEQ ID NO: 2137246 - DNA, 15 bp, Homo sapiens
tattcagatgtaagg

SEQ ID NO: 2137247 - DNA, 15 bp, Homo sapiens
attcagatgtaagga

SEQ ID NO: 2137248 - DNA, 15 bp, Homo sapiens
ttcagatgtaaggaa

SEQ ID NO: 2137249 - DNA, 15 bp, Homo sapiens
tcagatgtaaggaat

SEQ ID NO: 2137250 - DNA, 15 bp, Homo sapiens
cagatgtaaggaatg

SEQ ID NO: 2137251 - DNA, 15 bp, Homo sapiens
agatgtaaggaatga

SEQ ID NO: 2137252 - DNA, 15 bp, Homo sapiens
gatgtaaggaatgat

SEQ ID NO: 2137253 - DNA, 15 bp, Homo sapiens
atgtaaggaatgata

SEQ ID NO: 2137254 - DNA, 15 bp, Homo sapiens
tgtaaggaatgatat

SEQ ID NO: 2137255 - DNA, 15 bp, Homo sapiens
gtaaggaatgatata

SEQ ID NO: 2137256 - DNA, 15 bp, Homo sapiens
taaggaatgatatat

SEQ ID NO: 2137257 - DNA, 15 bp, Homo sapiens
aaggaatgatatatt

SEQ ID NO: 2137258 - DNA, 15 bp, Homo sapiens
aggaatgatatattg

SEQ ID NO: 2137259 - DNA, 15 bp, Homo sapiens
ggaatgatatattgc

SEQ ID NO: 2137260 - DNA, 15 bp, Homo sapiens
gaatgatatattgct

SEQ ID NO: 2137261 - DNA, 15 bp, Homo sapiens
aatgatatattgctt

SEQ ID NO: 2137262 - DNA, 15 bp, Homo sapiens
atgatatattgctta

SEQ ID NO: 2137263 - DNA, 15 bp, Homo sapiens
tgatatattgcttaa

SEQ ID NO: 2137264 - DNA, 15 bp, Homo sapiens
gatatattgcttaat

SEQ ID NO: 2137265 - DNA, 15 bp, Homo sapiens
atatattgcttaatt

SEQ ID NO: 2137266 - DNA, 15 bp, Homo sapiens
tatattgcttaattt

SEQ ID NO: 2137267 - DNA, 15 bp, Homo sapiens
atattgcttaatttt

SEQ ID NO: 2137268 - DNA, 15 bp, Homo sapiens
tattgcttaatttta

SEQ ID NO: 2137269 - DNA, 15 bp, Homo sapiens
attgcttaattttaa

SEQ ID NO: 2137270 - DNA, 15 bp, Homo sapiens
ttgcttaattttaaa

SEQ ID NO: 2137271 - DNA, 15 bp, Homo sapiens
tgcttaattttaaac

SEQ ID NO: 2137272 - DNA, 15 bp, Homo sapiens
gcttaattttaaaca

SEQ ID NO: 2137273 - DNA, 15 bp, Homo sapiens
cttaattttaaacaa

SEQ ID NO: 2137274 - DNA, 15 bp, Homo sapiens
ttaattttaaacaat

SEQ ID NO: 2137275 - DNA, 15 bp, Homo sapiens
taattttaaacaatc

SEQ ID NO: 2137276 - DNA, 15 bp, Homo sapiens
aattttaaacaatca

SEQ ID NO: 2137277 - DNA, 15 bp, Homo sapiens
attttaaacaatcaa

SEQ ID NO: 2137278 - DNA, 15 bp, Homo sapiens
ttttaaacaatcaag

SEQ ID NO: 2137279 - DNA, 15 bp, Homo sapiens
tttaaacaatcaaga

SEQ ID NO: 2137280 - DNA, 15 bp, Homo sapiens
ttaaacaatcaagac

SEQ ID NO: 2137281 - DNA, 15 bp, Homo sapiens
taaacaatcaagact

SEQ ID NO: 2137282 - DNA, 15 bp, Homo sapiens
aaacaatcaagactt

SEQ ID NO: 2137283 - DNA, 15 bp, Homo sapiens
aacaatcaagacttt

SEQ ID NO: 2137284 - DNA, 15 bp, Homo sapiens
acaatcaagacttta

SEQ ID NO: 2137285 - DNA, 15 bp, Homo sapiens
caatcaagactttac

SEQ ID NO: 2137286 - DNA, 15 bp, Homo sapiens
aatcaagactttact

SEQ ID NO: 2137287 - DNA, 15 bp, Homo sapiens
atcaagactttactg

SEQ ID NO: 2137288 - DNA, 15 bp, Homo sapiens
tcaagactttactgg

SEQ ID NO: 2137289 - DNA, 15 bp, Homo sapiens
caagactttactggt

SEQ ID NO: 2137290 - DNA, 15 bp, Homo sapiens
aagactttactggtg

SEQ ID NO: 2137291 - DNA, 15 bp, Homo sapiens
agactttactggtga

SEQ ID NO: 2137292 - DNA, 15 bp, Homo sapiens
gactttactggtgag

SEQ ID NO: 2137293 - DNA, 15 bp, Homo sapiens
actttactggtgagg

SEQ ID NO: 2137294 - DNA, 15 bp, Homo sapiens
ctttactggtgaggt

SEQ ID NO: 2137295 - DNA, 15 bp, Homo sapiens
tttactggtgaggtt

SEQ ID NO: 2137296 - DNA, 15 bp, Homo sapiens
ttactggtgaggtta

SEQ ID NO: 2137297 - DNA, 15 bp, Homo sapiens
tactggtgaggttaa

SEQ ID NO: 2137298 - DNA, 15 bp, Homo sapiens
actggtgaggttaag

SEQ ID NO: 2137299 - DNA, 15 bp, Homo sapiens
ctggtgaggttaagt

SEQ ID NO: 2137300 - DNA, 15 bp, Homo sapiens
tggtgaggttaagtt

SEQ ID NO: 2137301 - DNA, 15 bp, Homo sapiens
ggtgaggttaagtta

SEQ ID NO: 2137302 - DNA, 15 bp, Homo sapiens
gtgaggttaagttaa

SEQ ID NO: 2137303 - DNA, 15 bp, Homo sapiens
tgaggttaagttaaa

SEQ ID NO: 2137304 - DNA, 15 bp, Homo sapiens
gaggttaagttaaat

SEQ ID NO: 2137305 - DNA, 15 bp, Homo sapiens
aggttaagttaaatt

SEQ ID NO: 2137306 - DNA, 15 bp, Homo sapiens
ggttaagttaaatta

SEQ ID NO: 2137307 - DNA, 15 bp, Homo sapiens
gttaagttaaattat

SEQ ID NO: 2137308 - DNA, 15 bp, Homo sapiens
ttaagttaaattatt

SEQ ID NO: 2137309 - DNA, 15 bp, Homo sapiens
taagttaaattatta

SEQ ID NO: 2137310 - DNA, 15 bp, Homo sapiens
aagttaaattattac

SEQ ID NO: 2137311 - DNA, 15 bp, Homo sapiens
agttaaattattact

SEQ ID NO: 2137312 - DNA, 15 bp, Homo sapiens
gttaaattattactg

SEQ ID NO: 2137313 - DNA, 15 bp, Homo sapiens
ttaaattattactga

SEQ ID NO: 2137314 - DNA, 15 bp, Homo sapiens
taaattattactgat

SEQ ID NO: 2137315 - DNA, 15 bp, Homo sapiens
aaattattactgata

SEQ ID NO: 2137316 - DNA, 15 bp, Homo sapiens
aattattactgatac

SEQ ID NO: 2137317 - DNA, 15 bp, Homo sapiens
attattactgataca

SEQ ID NO: 2137318 - DNA, 15 bp, Homo sapiens
ttattactgatacat

SEQ ID NO: 2137319 - DNA, 15 bp, Homo sapiens
tattactgatacatt

SEQ ID NO: 2137320 - DNA, 15 bp, Homo sapiens
attactgatacattt

SEQ ID NO: 2137321 - DNA, 15 bp, Homo sapiens
ttactgatacatttt

SEQ ID NO: 2137322 - DNA, 15 bp, Homo sapiens
tactgatacattttt

SEQ ID NO: 2137323 - DNA, 15 bp, Homo sapiens
actgatacatttttc

SEQ ID NO: 2137324 - DNA, 15 bp, Homo sapiens
ctgatacatttttcc

SEQ ID NO: 2137325 - DNA, 15 bp, Homo sapiens
tgatacatttttcca

SEQ ID NO: 2137326 - DNA, 15 bp, Homo sapiens
gatacatttttccag

SEQ ID NO: 2137327 - DNA, 15 bp, Homo sapiens
atacatttttccagg

SEQ ID NO: 2137328 - DNA, 15 bp, Homo sapiens
tacatttttccaggt

SEQ ID NO: 2137329 - DNA, 15 bp, Homo sapiens
acatttttccaggta

SEQ ID NO: 2137330 - DNA, 15 bp, Homo sapiens
catttttccaggtaa

SEQ ID NO: 2137331 - DNA, 15 bp, Homo sapiens
atttttccaggtaac

SEQ ID NO: 2137332 - DNA, 15 bp, Homo sapiens
tttttccaggtaacc

SEQ ID NO: 2137333 - DNA, 15 bp, Homo sapiens
ttttccaggtaacca

SEQ ID NO: 2137334 - DNA, 15 bp, Homo sapiens
tttccaggtaaccag

SEQ ID NO: 2137335 - DNA, 15 bp, Homo sapiens
ttccaggtaaccagg

SEQ ID NO: 2137336 - DNA, 15 bp, Homo sapiens
tccaggtaaccagga

SEQ ID NO: 2137337 - DNA, 15 bp, Homo sapiens
ccaggtaaccaggaa

SEQ ID NO: 2137338 - DNA, 15 bp, Homo sapiens
caggtaaccaggaaa

SEQ ID NO: 2137339 - DNA, 15 bp, Homo sapiens
aggtaaccaggaaag

SEQ ID NO: 2137340 - DNA, 15 bp, Homo sapiens
ggtaaccaggaaaga

SEQ ID NO: 2137341 - DNA, 15 bp, Homo sapiens
gtaaccaggaaagag

SEQ ID NO: 2137342 - DNA, 15 bp, Homo sapiens
taaccaggaaagagc

SEQ ID NO: 2137343 - DNA, 15 bp, Homo sapiens
aaccaggaaagagct

SEQ ID NO: 2137344 - DNA, 15 bp, Homo sapiens
accaggaaagagcta

SEQ ID NO: 2137345 - DNA, 15 bp, Homo sapiens
ccaggaaagagctag

SEQ ID NO: 2137346 - DNA, 15 bp, Homo sapiens
caggaaagagctagt

SEQ ID NO: 2137347 - DNA, 15 bp, Homo sapiens
aggaaagagctagta

SEQ ID NO: 2137348 - DNA, 15 bp, Homo sapiens
ggaaagagctagtat

SEQ ID NO: 2137349 - DNA, 15 bp, Homo sapiens
gaaagagctagtatg

SEQ ID NO: 2137350 - DNA, 15 bp, Homo sapiens
aaagagctagtatga

SEQ ID NO: 2137351 - DNA, 15 bp, Homo sapiens
aagagctagtatgag

SEQ ID NO: 2137352 - DNA, 15 bp, Homo sapiens
agagctagtatgagg

SEQ ID NO: 2137353 - DNA, 15 bp, Homo sapiens
gagctagtatgagga

SEQ ID NO: 2137354 - DNA, 15 bp, Homo sapiens
agctagtatgaggaa

SEQ ID NO: 2137355 - DNA, 15 bp, Homo sapiens
gctagtatgaggaaa

SEQ ID NO: 2137356 - DNA, 15 bp, Homo sapiens
ctagtatgaggaaat

SEQ ID NO: 2137357 - DNA, 15 bp, Homo sapiens
tagtatgaggaaatg

SEQ ID NO: 2137358 - DNA, 15 bp, Homo sapiens
agtatgaggaaatga

SEQ ID NO: 2137359 - DNA, 15 bp, Homo sapiens
gtatgaggaaatgaa

SEQ ID NO: 2137360 - DNA, 15 bp, Homo sapiens
tatgaggaaatgaag

SEQ ID NO: 2137361 - DNA, 15 bp, Homo sapiens
atgaggaaatgaagt

SEQ ID NO: 2137362 - DNA, 15 bp, Homo sapiens
tgaggaaatgaagta

SEQ ID NO: 2137363 - DNA, 15 bp, Homo sapiens
gaggaaatgaagtaa

SEQ ID NO: 2137364 - DNA, 15 bp, Homo sapiens
gaaatgaagtaatag

SEQ ID NO: 2137365 - DNA, 15 bp, Homo sapiens
aaatgaagtaataga

SEQ ID NO: 2137366 - DNA, 15 bp, Homo sapiens
aatgaagtaatagat

SEQ ID NO: 2137367 - DNA, 15 bp, Homo sapiens
atgaagtaatagatg

SEQ ID NO: 2137368 - DNA, 15 bp, Homo sapiens
tgaagtaatagatgt

SEQ ID NO: 2137369 - DNA, 15 bp, Homo sapiens
gaagtaatagatgtg

SEQ ID NO: 2137370 - DNA, 15 bp, Homo sapiens
aagtaatagatgtga

SEQ ID NO: 2137371 - DNA, 15 bp, Homo sapiens
agtaatagatgtgag

SEQ ID NO: 2137372 - DNA, 15 bp, Homo sapiens
gtaatagatgtgaga

SEQ ID NO: 2137373 - DNA, 15 bp, Homo sapiens
taatagatgtgagat

SEQ ID NO: 2137374 - DNA, 15 bp, Homo sapiens
aatagatgtgagatc

SEQ ID NO: 2137375 - DNA, 15 bp, Homo sapiens
atagatgtgagatcc

SEQ ID NO: 2137376 - DNA, 15 bp, Homo sapiens
tagatgtgagatcca

SEQ ID NO: 2137377 - DNA, 15 bp, Homo sapiens
agatgtgagatccag

SEQ ID NO: 2137378 - DNA, 15 bp, Homo sapiens
gatgtgagatccaga

SEQ ID NO: 2137379 - DNA, 15 bp, Homo sapiens
atgtgagatccagac

SEQ ID NO: 2137380 - DNA, 15 bp, Homo sapiens
gtgagatccagaccg

SEQ ID NO: 2137381 - DNA, 15 bp, Homo sapiens
tgagatccagaccga

SEQ ID NO: 2137382 - DNA, 15 bp, Homo sapiens
gagatccagaccgaa

SEQ ID NO: 2137383 - DNA, 15 bp, Homo sapiens
agatccagaccgaaa

SEQ ID NO: 2137384 - DNA, 15 bp, Homo sapiens
gatccagaccgaaag

SEQ ID NO: 2137385 - DNA, 15 bp, Homo sapiens
atccagaccgaaagt

SEQ ID NO: 2137386 - DNA, 15 bp, Homo sapiens
tccagaccgaaagtc

SEQ ID NO: 2137387 - DNA, 15 bp, Homo sapiens
ccagaccgaaagtca

SEQ ID NO: 2137388 - DNA, 15 bp, Homo sapiens
cagaccgaaagtcac

SEQ ID NO: 2137389 - DNA, 15 bp, Homo sapiens
agaccgaaagtcact

SEQ ID NO: 2137390 - DNA, 15 bp, Homo sapiens
gaccgaaagtcactt

SEQ ID NO: 2137391 - DNA, 15 bp, Homo sapiens
accgaaagtcactta

SEQ ID NO: 2137392 - DNA, 15 bp, Homo sapiens
ccgaaagtcacttaa

SEQ ID NO: 2137393 - DNA, 15 bp, Homo sapiens
cgaaagtcacttaat

SEQ ID NO: 2137394 - DNA, 15 bp, Homo sapiens
gaaagtcacttaatt

SEQ ID NO: 2137395 - DNA, 15 bp, Homo sapiens
aaagtcacttaattc

SEQ ID NO: 2137396 - DNA, 15 bp, Homo sapiens
aagtcacttaattca

SEQ ID NO: 2137397 - DNA, 15 bp, Homo sapiens
agtcacttaattcag

SEQ ID NO: 2137398 - DNA, 15 bp, Homo sapiens
gtcacttaattcagc

SEQ ID NO: 2137399 - DNA, 15 bp, Homo sapiens
tcacttaattcagct

SEQ ID NO: 2137400 - DNA, 15 bp, Homo sapiens
cacttaattcagctt

SEQ ID NO: 2137401 - DNA, 15 bp, Homo sapiens
acttaattcagcttg

SEQ ID NO: 2137402 - DNA, 15 bp, Homo sapiens
cttaattcagcttgc

SEQ ID NO: 2137403 - DNA, 15 bp, Homo sapiens
ttaattcagcttgcg

SEQ ID NO: 2137404 - DNA, 15 bp, Homo sapiens
taattcagcttgcga

SEQ ID NO: 2137405 - DNA, 15 bp, Homo sapiens
aattcagcttgcgaa

SEQ ID NO: 2137406 - DNA, 15 bp, Homo sapiens
attcagcttgcgaat

SEQ ID NO: 2137407 - DNA, 15 bp, Homo sapiens
ttcagcttgcgaatg

SEQ ID NO: 2137408 - DNA, 15 bp, Homo sapiens
tcagcttgcgaatgt

SEQ ID NO: 2137409 - DNA, 15 bp, Homo sapiens
cagcttgcgaatgtg

SEQ ID NO: 2137410 - DNA, 15 bp, Homo sapiens
agcttgcgaatgtgc

SEQ ID NO: 2137411 - DNA, 15 bp, Homo sapiens
gcttgcgaatgtgct

SEQ ID NO: 2137412 - DNA, 15 bp, Homo sapiens
cttgcgaatgtgctt

SEQ ID NO: 2137413 - DNA, 15 bp, Homo sapiens
ttgcgaatgtgcttt

SEQ ID NO: 2137414 - DNA, 15 bp, Homo sapiens
tgcgaatgtgctttc

SEQ ID NO: 2137415 - DNA, 15 bp, Homo sapiens
gcgaatgtgctttct

SEQ ID NO: 2137416 - DNA, 15 bp, Homo sapiens
cgaatgtgctttcta

SEQ ID NO: 2137417 - DNA, 15 bp, Homo sapiens
gaatgtgctttctaa

SEQ ID NO: 2137418 - DNA, 15 bp, Homo sapiens
aatgtgctttctaaa

SEQ ID NO: 2137419 - DNA, 15 bp, Homo sapiens
atgtgctttctaaat

SEQ ID NO: 2137420 - DNA, 15 bp, Homo sapiens
tgtgctttctaaatt

SEQ ID NO: 2137421 - DNA, 15 bp, Homo sapiens
gtgctttctaaatta

SEQ ID NO: 2137422 - DNA, 15 bp, Homo sapiens
tgctttctaaattat

SEQ ID NO: 2137423 - DNA, 15 bp, Homo sapiens
gctttctaaattata

SEQ ID NO: 2137424 - DNA, 15 bp, Homo sapiens
ctttctaaattataa

SEQ ID NO: 2137425 - DNA, 15 bp, Homo sapiens
tttctaaattataaa

SEQ ID NO: 2137426 - DNA, 15 bp, Homo sapiens
ttctaaattataaag

SEQ ID NO: 2137427 - DNA, 15 bp, Homo sapiens
tctaaattataaagc

SEQ ID NO: 2137428 - DNA, 15 bp, Homo sapiens
ctaaattataaagca

SEQ ID NO: 2137429 - DNA, 15 bp, Homo sapiens
taaattataaagcac

SEQ ID NO: 2137430 - DNA, 15 bp, Homo sapiens
aaattataaagcact

SEQ ID NO: 2137431 - DNA, 15 bp, Homo sapiens
aattataaagcactt

SEQ ID NO: 2137432 - DNA, 15 bp, Homo sapiens
attataaagcacttg

SEQ ID NO: 2137433 - DNA, 15 bp, Homo sapiens
ttataaagcacttgt

SEQ ID NO: 2137434 - DNA, 15 bp, Homo sapiens
tataaagcacttgta

SEQ ID NO: 2137435 - DNA, 15 bp, Homo sapiens
ataaagcacttgtaa

SEQ ID NO: 2137436 - DNA, 15 bp, Homo sapiens
taaagcacttgtaaa

SEQ ID NO: 2137437 - DNA, 15 bp, Homo sapiens
aaagcacttgtaaat

SEQ ID NO: 2137438 - DNA, 15 bp, Homo sapiens
aagcacttgtaaatg

SEQ ID NO: 2137439 - DNA, 15 bp, Homo sapiens
agcacttgtaaatga

SEQ ID NO: 2137440 - DNA, 15 bp, Homo sapiens
gcacttgtaaatgaa

SEQ ID NO: 2137441 - DNA, 15 bp, Homo sapiens
cacttgtaaatgaaa

SEQ ID NO: 2137442 - DNA, 15 bp, Homo sapiens
acttgtaaatgaaaa

SEQ ID NO: 2137443 - DNA, 15 bp, Homo sapiens
cttgtaaatgaaaaa

SEQ ID NO: 2137444 - DNA, 15 bp, Homo sapiens
ttgtaaatgaaaaat

SEQ ID NO: 2137445 - DNA, 15 bp, Homo sapiens
tgtaaatgaaaaatt

SEQ ID NO: 2137446 - DNA, 15 bp, Homo sapiens
gtaaatgaaaaattt

SEQ ID NO: 2137447 - DNA, 15 bp, Homo sapiens
taaatgaaaaatttg

SEQ ID NO: 2137448 - DNA, 15 bp, Homo sapiens
aaatgaaaaatttga

SEQ ID NO: 2137449 - DNA, 15 bp, Homo sapiens
aatgaaaaatttgat

SEQ ID NO: 2137450 - DNA, 15 bp, Homo sapiens
atgaaaaatttgatg

SEQ ID NO: 2137451 - DNA, 15 bp, Homo sapiens
tgaaaaatttgatgc

SEQ ID NO: 2137452 - DNA, 15 bp, Homo sapiens
gaaaaatttgatgct

SEQ ID NO: 2137453 - DNA, 15 bp, Homo sapiens
aaaaatttgatgctt

SEQ ID NO: 2137454 - DNA, 15 bp, Homo sapiens
aaaatttgatgcttt

SEQ ID NO: 2137455 - DNA, 15 bp, Homo sapiens
aaatttgatgctttc

SEQ ID NO: 2137456 - DNA, 15 bp, Homo sapiens
aatttgatgctttct

SEQ ID NO: 2137457 - DNA, 15 bp, Homo sapiens
atttgatgctttctg

SEQ ID NO: 2137458 - DNA, 15 bp, Homo sapiens
tttgatgctttctgt

SEQ ID NO: 2137459 - DNA, 15 bp, Homo sapiens
ttgatgctttctgta

SEQ ID NO: 2137460 - DNA, 15 bp, Homo sapiens
tgatgctttctgtat

SEQ ID NO: 2137461 - DNA, 15 bp, Homo sapiens
gatgctttctgtatg

SEQ ID NO: 2137462 - DNA, 15 bp, Homo sapiens
atgctttctgtatga

SEQ ID NO: 2137463 - DNA, 15 bp, Homo sapiens
tgctttctgtatgaa

SEQ ID NO: 2137464 - DNA, 15 bp, Homo sapiens
gctttctgtatgaat

SEQ ID NO: 2137465 - DNA, 15 bp, Homo sapiens
ctttctgtatgaata

SEQ ID NO: 2137466 - DNA, 15 bp, Homo sapiens
tttctgtatgaataa

SEQ ID NO: 2137467 - DNA, 15 bp, Homo sapiens
ttctgtatgaataaa

SEQ ID NO: 2137468 - DNA, 15 bp, Homo sapiens
tctgtatgaataaaa

SEQ ID NO: 2137469 - DNA, 15 bp, Homo sapiens
ctgtatgaataaaac

SEQ ID NO: 2137470 - DNA, 15 bp, Homo sapiens
tgtatgaataaaact

SEQ ID NO: 2137471 - DNA, 15 bp, Homo sapiens
gtatgaataaaactt

SEQ ID NO: 2137472 - DNA, 15 bp, Homo sapiens
tatgaataaaacttt

SEQ ID NO: 2137473 - DNA, 15 bp, Homo sapiens
atgaataaaactttc

SEQ ID NO: 2137474 - DNA, 15 bp, Homo sapiens
tgaataaaactttct

SEQ ID NO: 2137475 - DNA, 15 bp, Homo sapiens
gaataaaactttctg

SEQ ID NO: 2137476 - DNA, 15 bp, Homo sapiens
aataaaactttctgt

SEQ ID NO: 2137477 - DNA, 15 bp, Homo sapiens
ataaaactttctgta

SEQ ID NO: 2137478 - DNA, 15 bp, Homo sapiens
taaaactttctgtaa

SEQ ID NO: 2137479 - DNA, 15 bp, Homo sapiens
aaaactttctgtaag

SEQ ID NO: 2137480 - DNA, 15 bp, Homo sapiens
aaactttctgtaagc

SEQ ID NO: 2137481 - DNA, 15 bp, Homo sapiens
aactttctgtaagct

SEQ ID NO: 2137482 - DNA, 15 bp, Homo sapiens
actttctgtaagcta

SEQ ID NO: 2137483 - DNA, 15 bp, Homo sapiens
ctttctgtaagctag

SEQ ID NO: 2137484 - DNA, 15 bp, Homo sapiens
tttctgtaagctagg

SEQ ID NO: 2137485 - DNA, 15 bp, Homo sapiens
ttctgtaagctaggt

SEQ ID NO: 2137486 - DNA, 15 bp, Homo sapiens
tctgtaagctaggta

SEQ ID NO: 2137487 - DNA, 15 bp, Homo sapiens
ctgtaagctaggtat

SEQ ID NO: 2137488 - DNA, 15 bp, Homo sapiens
tgtaagctaggtatt

SEQ ID NO: 2137489 - DNA, 15 bp, Homo sapiens
gtaagctaggtattg

SEQ ID NO: 2137490 - DNA, 15 bp, Homo sapiens
taagctaggtattgt

SEQ ID NO: 2137491 - DNA, 15 bp, Homo sapiens
aagctaggtattgtc

SEQ ID NO: 2137492 - DNA, 15 bp, Homo sapiens
agctaggtattgtct

SEQ ID NO: 2137493 - DNA, 15 bp, Homo sapiens
gctaggtattgtctc

SEQ ID NO: 2137494 - DNA, 15 bp, Homo sapiens
ctaggtattgtctct

SEQ ID NO: 2137495 - DNA, 15 bp, Homo sapiens
taggtattgtctcta

SEQ ID NO: 2137496 - DNA, 15 bp, Homo sapiens
aggtattgtctctac

SEQ ID NO: 2137497 - DNA, 15 bp, Homo sapiens
ggtattgtctctaca

SEQ ID NO: 2137498 - DNA, 15 bp, Homo sapiens
gtattgtctctacaa

SEQ ID NO: 2137499 - DNA, 15 bp, Homo sapiens
tattgtctctacaaa

SEQ ID NO: 2137500 - DNA, 15 bp, Homo sapiens
attgtctctacaaaa

SEQ ID NO: 2137501 - DNA, 15 bp, Homo sapiens
ttgtctctacaaaat

SEQ ID NO: 2137502 - DNA, 15 bp, Homo sapiens
gtctctacaaaattc

SEQ ID NO: 2137503 - DNA, 15 bp, Homo sapiens
tctctacaaaattct

SEQ ID NO: 2137504 - DNA, 15 bp, Homo sapiens
ctctacaaaattctc

SEQ ID NO: 2137505 - DNA, 15 bp, Homo sapiens
tctacaaaattctca

SEQ ID NO: 2137506 - DNA, 15 bp, Homo sapiens
ctacaaaattctcat

SEQ ID NO: 2137507 - DNA, 15 bp, Homo sapiens
tacaaaattctcatt

SEQ ID NO: 2137508 - DNA, 15 bp, Homo sapiens
acaaaattctcattg

SEQ ID NO: 2137509 - DNA, 15 bp, Homo sapiens
caaaattctcattgt

SEQ ID NO: 2137510 - DNA, 15 bp, Homo sapiens
aaaattctcattgta

SEQ ID NO: 2137511 - DNA, 15 bp, Homo sapiens
aaattctcattgtat

SEQ ID NO: 2137512 - DNA, 15 bp, Homo sapiens
aattctcattgtata

SEQ ID NO: 2137513 - DNA, 15 bp, Homo sapiens
attctcattgtatag

SEQ ID NO: 2137514 - DNA, 15 bp, Homo sapiens
ttctcattgtatagt

SEQ ID NO: 2137515 - DNA, 15 bp, Homo sapiens
tctcattgtatagtt

SEQ ID NO: 2137516 - DNA, 15 bp, Homo sapiens
ctcattgtatagtta

SEQ ID NO: 2137517 - DNA, 15 bp, Homo sapiens
tcattgtatagttaa

SEQ ID NO: 2137518 - DNA, 15 bp, Homo sapiens
cattgtatagttaaa

SEQ ID NO: 2137519 - DNA, 15 bp, Homo sapiens
attgtatagttaaac

SEQ ID NO: 2137520 - DNA, 15 bp, Homo sapiens
ttgtatagttaaacc

SEQ ID NO: 2137521 - DNA, 15 bp, Homo sapiens
tgtatagttaaacca

SEQ ID NO: 2137522 - DNA, 15 bp, Homo sapiens
gtatagttaaaccac

SEQ ID NO: 2137523 - DNA, 15 bp, Homo sapiens
tatagttaaaccaca

SEQ ID NO: 2137524 - DNA, 15 bp, Homo sapiens
atagttaaaccacag

SEQ ID NO: 2137525 - DNA, 15 bp, Homo sapiens
tagttaaaccacagt

SEQ ID NO: 2137526 - DNA, 15 bp, Homo sapiens
agttaaaccacagtg

SEQ ID NO: 2137527 - DNA, 15 bp, Homo sapiens
gttaaaccacagtga

SEQ ID NO: 2137528 - DNA, 15 bp, Homo sapiens
ttaaaccacagtgag

SEQ ID NO: 2137529 - DNA, 15 bp, Homo sapiens
taaaccacagtgaga

SEQ ID NO: 2137530 - DNA, 15 bp, Homo sapiens
aaaccacagtgagaa

SEQ ID NO: 2137531 - DNA, 15 bp, Homo sapiens
accacagtgagaagg

SEQ ID NO: 2137532 - DNA, 15 bp, Homo sapiens
ccacagtgagaaggg

SEQ ID NO: 2137533 - DNA, 15 bp, Homo sapiens
cacagtgagaagggt

SEQ ID NO: 2137534 - DNA, 15 bp, Homo sapiens
acagtgagaagggtt

SEQ ID NO: 2137535 - DNA, 15 bp, Homo sapiens
cagtgagaagggttc

SEQ ID NO: 2137536 - DNA, 15 bp, Homo sapiens
agtgagaagggttct

SEQ ID NO: 2137537 - DNA, 15 bp, Homo sapiens
gtgagaagggttcta

SEQ ID NO: 2137538 - DNA, 15 bp, Homo sapiens
tgagaagggttctat

SEQ ID NO: 2137539 - DNA, 15 bp, Homo sapiens
gagaagggttctata

SEQ ID NO: 2137540 - DNA, 15 bp, Homo sapiens
agaagggttctataa

SEQ ID NO: 2137541 - DNA, 15 bp, Homo sapiens
gaagggttctataag

SEQ ID NO: 2137542 - DNA, 15 bp, Homo sapiens
aagggttctataagt

SEQ ID NO: 2137543 - DNA, 15 bp, Homo sapiens
agggttctataagta

SEQ ID NO: 2137544 - DNA, 15 bp, Homo sapiens
gggttctataagtag

SEQ ID NO: 2137545 - DNA, 15 bp, Homo sapiens
ggttctataagtagt

SEQ ID NO: 2137546 - DNA, 15 bp, Homo sapiens
gttctataagtagtt

SEQ ID NO: 2137547 - DNA, 15 bp, Homo sapiens
ttctataagtagtta

SEQ ID NO: 2137548 - DNA, 15 bp, Homo sapiens
ctataagtagttata

SEQ ID NO: 2137549 - DNA, 15 bp, Homo sapiens
tataagtagttatac

SEQ ID NO: 2137550 - DNA, 15 bp, Homo sapiens
ataagtagttataca

SEQ ID NO: 2137551 - DNA, 15 bp, Homo sapiens
taagtagttatacaa

SEQ ID NO: 2137552 - DNA, 15 bp, Homo sapiens
aagtagttatacaaa

SEQ ID NO: 2137553 - DNA, 15 bp, Homo sapiens
agtagttatacaaac

SEQ ID NO: 2137554 - DNA, 15 bp, Homo sapiens
gtagttatacaaacc

SEQ ID NO: 2137555 - DNA, 15 bp, Homo sapiens
tagttatacaaacca

SEQ ID NO: 2137556 - DNA, 15 bp, Homo sapiens
agttatacaaaccaa

SEQ ID NO: 2137557 - DNA, 15 bp, Homo sapiens
gttatacaaaccaag

SEQ ID NO: 2137558 - DNA, 15 bp, Homo sapiens
ttatacaaaccaagg

SEQ ID NO: 2137559 - DNA, 15 bp, Homo sapiens
tatacaaaccaaggg

SEQ ID NO: 2137560 - DNA, 15 bp, Homo sapiens
atacaaaccaagggt

SEQ ID NO: 2137561 - DNA, 15 bp, Homo sapiens
tacaaaccaagggtt

SEQ ID NO: 2137562 - DNA, 15 bp, Homo sapiens
acaaaccaagggttt

SEQ ID NO: 2137563 - DNA, 15 bp, Homo sapiens
caaaccaagggttta

SEQ ID NO: 2137564 - DNA, 15 bp, Homo sapiens
aaaccaagggtttaa

SEQ ID NO: 2137565 - DNA, 15 bp, Homo sapiens
aaccaagggtttaaa

SEQ ID NO: 2137566 - DNA, 15 bp, Homo sapiens
accaagggtttaaat

SEQ ID NO: 2137567 - DNA, 15 bp, Homo sapiens
ccaagggtttaaata

SEQ ID NO: 2137568 - DNA, 15 bp, Homo sapiens
caagggtttaaatac

SEQ ID NO: 2137569 - DNA, 15 bp, Homo sapiens
aagggtttaaatacc

SEQ ID NO: 2137570 - DNA, 15 bp, Homo sapiens
agggtttaaatacct

SEQ ID NO: 2137571 - DNA, 15 bp, Homo sapiens
gggtttaaatacctg

SEQ ID NO: 2137572 - DNA, 15 bp, Homo sapiens
ggtttaaatacctgt

SEQ ID NO: 2137573 - DNA, 15 bp, Homo sapiens
gtttaaatacctgtt

SEQ ID NO: 2137574 - DNA, 15 bp, Homo sapiens
tttaaatacctgtta

SEQ ID NO: 2137575 - DNA, 15 bp, Homo sapiens
ttaaatacctgttaa

SEQ ID NO: 2137576 - DNA, 15 bp, Homo sapiens
taaatacctgttaaa

SEQ ID NO: 2137577 - DNA, 15 bp, Homo sapiens
aaatacctgttaaat

SEQ ID NO: 2137578 - DNA, 15 bp, Homo sapiens
aatacctgttaaata

SEQ ID NO: 2137579 - DNA, 15 bp, Homo sapiens
atacctgttaaatag

SEQ ID NO: 2137580 - DNA, 15 bp, Homo sapiens
tacctgttaaataga

SEQ ID NO: 2137581 - DNA, 15 bp, Homo sapiens
acctgttaaatagat

SEQ ID NO: 2137582 - DNA, 15 bp, Homo sapiens
cctgttaaatagatc

SEQ ID NO: 2137583 - DNA, 15 bp, Homo sapiens
ctgttaaatagatca

SEQ ID NO: 2137584 - DNA, 15 bp, Homo sapiens
tgttaaatagatcaa

SEQ ID NO: 2137585 - DNA, 15 bp, Homo sapiens
gttaaatagatcaat

SEQ ID NO: 2137586 - DNA, 15 bp, Homo sapiens
ttaaatagatcaatt

SEQ ID NO: 2137587 - DNA, 15 bp, Homo sapiens
taaatagatcaattt

SEQ ID NO: 2137588 - DNA, 15 bp, Homo sapiens
aaatagatcaatttt

SEQ ID NO: 2137589 - DNA, 15 bp, Homo sapiens
aatagatcaattttg

SEQ ID NO: 2137590 - DNA, 15 bp, Homo sapiens
atagatcaattttga

SEQ ID NO: 2137591 - DNA, 15 bp, Homo sapiens
tagatcaattttgat

SEQ ID NO: 2137592 - DNA, 15 bp, Homo sapiens
agatcaattttgatt

SEQ ID NO: 2137593 - DNA, 15 bp, Homo sapiens
gatcaattttgattg

SEQ ID NO: 2137594 - DNA, 15 bp, Homo sapiens
atcaattttgattgc

SEQ ID NO: 2137595 - DNA, 15 bp, Homo sapiens
tcaattttgattgcc

SEQ ID NO: 2137596 - DNA, 15 bp, Homo sapiens
caattttgattgcct

SEQ ID NO: 2137597 - DNA, 15 bp, Homo sapiens
aattttgattgccta

SEQ ID NO: 2137598 - DNA, 15 bp, Homo sapiens
attttgattgcctac

SEQ ID NO: 2137599 - DNA, 15 bp, Homo sapiens
ttttgattgcctact

SEQ ID NO: 2137600 - DNA, 15 bp, Homo sapiens
tttgattgcctacta

SEQ ID NO: 2137601 - DNA, 15 bp, Homo sapiens
ttgattgcctactat

SEQ ID NO: 2137602 - DNA, 15 bp, Homo sapiens
tgattgcctactatg

SEQ ID NO: 2137603 - DNA, 15 bp, Homo sapiens
gattgcctactatgt

SEQ ID NO: 2137604 - DNA, 15 bp, Homo sapiens
attgcctactatgtg

SEQ ID NO: 2137605 - DNA, 15 bp, Homo sapiens
ttgcctactatgtga

SEQ ID NO: 2137606 - DNA, 15 bp, Homo sapiens
tgcctactatgtgaa

SEQ ID NO: 2137607 - DNA, 15 bp, Homo sapiens
gcctactatgtgaac

SEQ ID NO: 2137608 - DNA, 15 bp, Homo sapiens
cctactatgtgaact

SEQ ID NO: 2137609 - DNA, 15 bp, Homo sapiens
ctactatgtgaactc

SEQ ID NO: 2137610 - DNA, 15 bp, Homo sapiens
tactatgtgaactca

SEQ ID NO: 2137611 - DNA, 15 bp, Homo sapiens
actatgtgaactcac

SEQ ID NO: 2137612 - DNA, 15 bp, Homo sapiens
ctatgtgaactcact

SEQ ID NO: 2137613 - DNA, 15 bp, Homo sapiens
tatgtgaactcactg

SEQ ID NO: 2137614 - DNA, 15 bp, Homo sapiens
atgtgaactcactgt

SEQ ID NO: 2137615 - DNA, 15 bp, Homo sapiens
tgtgaactcactgtt

SEQ ID NO: 2137616 - DNA, 15 bp, Homo sapiens
gtgaactcactgtta

SEQ ID NO: 2137617 - DNA, 15 bp, Homo sapiens
tgaactcactgttaa

SEQ ID NO: 2137618 - DNA, 15 bp, Homo sapiens
gaactcactgttaaa

SEQ ID NO: 2137619 - DNA, 15 bp, Homo sapiens
aactcactgttaaag

SEQ ID NO: 2137620 - DNA, 15 bp, Homo sapiens
actcactgttaaagg

SEQ ID NO: 2137621 - DNA, 15 bp, Homo sapiens
ctcactgttaaaggc

SEQ ID NO: 2137622 - DNA, 15 bp, Homo sapiens
tcactgttaaaggca

SEQ ID NO: 2137623 - DNA, 15 bp, Homo sapiens
cactgttaaaggcac

SEQ ID NO: 2137624 - DNA, 15 bp, Homo sapiens
actgttaaaggcact

SEQ ID NO: 2137625 - DNA, 15 bp, Homo sapiens
ctgttaaaggcactg

SEQ ID NO: 2137626 - DNA, 15 bp, Homo sapiens
tgttaaaggcactga

SEQ ID NO: 2137627 - DNA, 15 bp, Homo sapiens
gttaaaggcactgaa

SEQ ID NO: 2137628 - DNA, 15 bp, Homo sapiens
ttaaaggcactgaaa

SEQ ID NO: 2137629 - DNA, 15 bp, Homo sapiens
taaaggcactgaaaa

SEQ ID NO: 2137630 - DNA, 15 bp, Homo sapiens
aaaggcactgaaaat

SEQ ID NO: 2137631 - DNA, 15 bp, Homo sapiens
aaggcactgaaaatt

SEQ ID NO: 2137632 - DNA, 15 bp, Homo sapiens
aggcactgaaaattt

SEQ ID NO: 2137633 - DNA, 15 bp, Homo sapiens
ggcactgaaaattta

SEQ ID NO: 2137634 - DNA, 15 bp, Homo sapiens
gcactgaaaatttat

SEQ ID NO: 2137635 - DNA, 15 bp, Homo sapiens
cactgaaaatttatc

SEQ ID NO: 2137636 - DNA, 15 bp, Homo sapiens
actgaaaatttatca

SEQ ID NO: 2137637 - DNA, 15 bp, Homo sapiens
ctgaaaatttatcat

SEQ ID NO: 2137638 - DNA, 15 bp, Homo sapiens
tgaaaatttatcata

SEQ ID NO: 2137639 - DNA, 15 bp, Homo sapiens
gaaaatttatcatat

SEQ ID NO: 2137640 - DNA, 15 bp, Homo sapiens
aaaatttatcatatt

SEQ ID NO: 2137641 - DNA, 15 bp, Homo sapiens
aaatttatcatattt

SEQ ID NO: 2137642 - DNA, 15 bp, Homo sapiens
aatttatcatatttc

SEQ ID NO: 2137643 - DNA, 15 bp, Homo sapiens
atttatcatatttca

SEQ ID NO: 2137644 - DNA, 15 bp, Homo sapiens
tttatcatatttcat

SEQ ID NO: 2137645 - DNA, 15 bp, Homo sapiens
ttatcatatttcatt

SEQ ID NO: 2137646 - DNA, 15 bp, Homo sapiens
tatcatatttcattt

SEQ ID NO: 2137647 - DNA, 15 bp, Homo sapiens
atcatatttcattta

SEQ ID NO: 2137648 - DNA, 15 bp, Homo sapiens
tcatatttcatttag

SEQ ID NO: 2137649 - DNA, 15 bp, Homo sapiens
catatttcatttagc

SEQ ID NO: 2137650 - DNA, 15 bp, Homo sapiens
atatttcatttagcc

SEQ ID NO: 2137651 - DNA, 15 bp, Homo sapiens
tatttcatttagcca

SEQ ID NO: 2137652 - DNA, 15 bp, Homo sapiens
atttcatttagccac

SEQ ID NO: 2137653 - DNA, 15 bp, Homo sapiens
tttcatttagccaca

SEQ ID NO: 2137654 - DNA, 15 bp, Homo sapiens
ttcatttagccacag

SEQ ID NO: 2137655 - DNA, 15 bp, Homo sapiens
tcatttagccacagc

SEQ ID NO: 2137656 - DNA, 15 bp, Homo sapiens
catttagccacagcc

SEQ ID NO: 2137657 - DNA, 15 bp, Homo sapiens
atttagccacagcca

SEQ ID NO: 2137658 - DNA, 15 bp, Homo sapiens
tttagccacagccaa

SEQ ID NO: 2137659 - DNA, 15 bp, Homo sapiens
ttagccacagccaaa

SEQ ID NO: 2137660 - DNA, 15 bp, Homo sapiens
tagccacagccaaaa

SEQ ID NO: 2137661 - DNA, 15 bp, Homo sapiens
agccacagccaaaaa

SEQ ID NO: 2137662 - DNA, 15 bp, Homo sapiens
gccacagccaaaaat

SEQ ID NO: 2137663 - DNA, 15 bp, Homo sapiens
ccacagccaaaaata

SEQ ID NO: 2137664 - DNA, 15 bp, Homo sapiens
cacagccaaaaataa

SEQ ID NO: 2137665 - DNA, 15 bp, Homo sapiens
acagccaaaaataag

SEQ ID NO: 2137666 - DNA, 15 bp, Homo sapiens
cagccaaaaataagg

SEQ ID NO: 2137667 - DNA, 15 bp, Homo sapiens
agccaaaaataaggc

SEQ ID NO: 2137668 - DNA, 15 bp, Homo sapiens
gccaaaaataaggca

SEQ ID NO: 2137669 - DNA, 15 bp, Homo sapiens
ccaaaaataaggcaa

SEQ ID NO: 2137670 - DNA, 15 bp, Homo sapiens
caaaaataaggcaat

SEQ ID NO: 2137671 - DNA, 15 bp, Homo sapiens
aaaaataaggcaata

SEQ ID NO: 2137672 - DNA, 15 bp, Homo sapiens
aaaataaggcaatac

SEQ ID NO: 2137673 - DNA, 15 bp, Homo sapiens
aaataaggcaatacc

SEQ ID NO: 2137674 - DNA, 15 bp, Homo sapiens
aataaggcaatacct

SEQ ID NO: 2137675 - DNA, 15 bp, Homo sapiens
ataaggcaataccta

SEQ ID NO: 2137676 - DNA, 15 bp, Homo sapiens
taaggcaatacctat

SEQ ID NO: 2137677 - DNA, 15 bp, Homo sapiens
aaggcaatacctatg

SEQ ID NO: 2137678 - DNA, 15 bp, Homo sapiens
aggcaatacctatgt

SEQ ID NO: 2137679 - DNA, 15 bp, Homo sapiens
ggcaatacctatgtt

SEQ ID NO: 2137680 - DNA, 15 bp, Homo sapiens
gcaatacctatgtta

SEQ ID NO: 2137681 - DNA, 15 bp, Homo sapiens
caatacctatgttag

SEQ ID NO: 2137682 - DNA, 15 bp, Homo sapiens
aatacctatgttagc

SEQ ID NO: 2137683 - DNA, 15 bp, Homo sapiens
atacctatgttagca

SEQ ID NO: 2137684 - DNA, 15 bp, Homo sapiens
tacctatgttagcat

SEQ ID NO: 2137685 - DNA, 15 bp, Homo sapiens
acctatgttagcatt

SEQ ID NO: 2137686 - DNA, 15 bp, Homo sapiens
cctatgttagcattt

SEQ ID NO: 2137687 - DNA, 15 bp, Homo sapiens
ctatgttagcatttt

SEQ ID NO: 2137688 - DNA, 15 bp, Homo sapiens
tatgttagcattttg

SEQ ID NO: 2137689 - DNA, 15 bp, Homo sapiens
atgttagcattttgt

SEQ ID NO: 2137690 - DNA, 15 bp, Homo sapiens
tgttagcattttgtg

SEQ ID NO: 2137691 - DNA, 15 bp, Homo sapiens
gttagcattttgtga

SEQ ID NO: 2137692 - DNA, 15 bp, Homo sapiens
ttagcattttgtgaa

SEQ ID NO: 2137693 - DNA, 15 bp, Homo sapiens
tagcattttgtgaac

SEQ ID NO: 2137694 - DNA, 15 bp, Homo sapiens
agcattttgtgaact

SEQ ID NO: 2137695 - DNA, 15 bp, Homo sapiens
gcattttgtgaactc

SEQ ID NO: 2137696 - DNA, 15 bp, Homo sapiens
cattttgtgaactct

SEQ ID NO: 2137697 - DNA, 15 bp, Homo sapiens
attttgtgaactcta

SEQ ID NO: 2137698 - DNA, 15 bp, Homo sapiens
ttttgtgaactctaa

SEQ ID NO: 2137699 - DNA, 15 bp, Homo sapiens
tttgtgaactctaag

SEQ ID NO: 2137700 - DNA, 15 bp, Homo sapiens
ttgtgaactctaagg

SEQ ID NO: 2137701 - DNA, 15 bp, Homo sapiens
tgtgaactctaaggc

SEQ ID NO: 2137702 - DNA, 15 bp, Homo sapiens
gtgaactctaaggca

SEQ ID NO: 2137703 - DNA, 15 bp, Homo sapiens
tgaactctaaggcac

SEQ ID NO: 2137704 - DNA, 15 bp, Homo sapiens
gaactctaaggcacc

SEQ ID NO: 2137705 - DNA, 15 bp, Homo sapiens
aactctaaggcacca

SEQ ID NO: 2137706 - DNA, 15 bp, Homo sapiens
actctaaggcaccat

SEQ ID NO: 2137707 - DNA, 15 bp, Homo sapiens
ctctaaggcaccata

SEQ ID NO: 2137708 - DNA, 15 bp, Homo sapiens
tctaaggcaccatat

SEQ ID NO: 2137709 - DNA, 15 bp, Homo sapiens
ctaaggcaccatata

SEQ ID NO: 2137710 - DNA, 15 bp, Homo sapiens
taaggcaccatataa

SEQ ID NO: 2137711 - DNA, 15 bp, Homo sapiens
aaggcaccatataaa

SEQ ID NO: 2137712 - DNA, 15 bp, Homo sapiens
aggcaccatataaat

SEQ ID NO: 2137713 - DNA, 15 bp, Homo sapiens
ggcaccatataaatg

SEQ ID NO: 2137714 - DNA, 15 bp, Homo sapiens
gcaccatataaatgt

SEQ ID NO: 2137715 - DNA, 15 bp, Homo sapiens
caccatataaatgta

SEQ ID NO: 2137716 - DNA, 15 bp, Homo sapiens
accatataaatgtaa

SEQ ID NO: 2137717 - DNA, 15 bp, Homo sapiens
ccatataaatgtaac

SEQ ID NO: 2137718 - DNA, 15 bp, Homo sapiens
catataaatgtaact

SEQ ID NO: 2137719 - DNA, 15 bp, Homo sapiens
atataaatgtaactg

SEQ ID NO: 2137720 - DNA, 15 bp, Homo sapiens
tataaatgtaactgt

SEQ ID NO: 2137721 - DNA, 15 bp, Homo sapiens
ataaatgtaactgtt

SEQ ID NO: 2137722 - DNA, 15 bp, Homo sapiens
taaatgtaactgttg

SEQ ID NO: 2137723 - DNA, 15 bp, Homo sapiens
aaatgtaactgttga

SEQ ID NO: 2137724 - DNA, 15 bp, Homo sapiens
aatgtaactgttgat

SEQ ID NO: 2137725 - DNA, 15 bp, Homo sapiens
atgtaactgttgatt

SEQ ID NO: 2137726 - DNA, 15 bp, Homo sapiens
tgtaactgttgattt

SEQ ID NO: 2137727 - DNA, 15 bp, Homo sapiens
gtaactgttgatttt

SEQ ID NO: 2137728 - DNA, 15 bp, Homo sapiens
taactgttgattttc

SEQ ID NO: 2137729 - DNA, 15 bp, Homo sapiens
aactgttgattttct

SEQ ID NO: 2137730 - DNA, 15 bp, Homo sapiens
actgttgattttctc

SEQ ID NO: 2137731 - DNA, 15 bp, Homo sapiens
ctgttgattttctca

SEQ ID NO: 2137732 - DNA, 15 bp, Homo sapiens
tgttgattttctcac

SEQ ID NO: 2137733 - DNA, 15 bp, Homo sapiens
gttgattttctcact

SEQ ID NO: 2137734 - DNA, 15 bp, Homo sapiens
ttgattttctcactt

SEQ ID NO: 2137735 - DNA, 15 bp, Homo sapiens
tgattttctcacttg

SEQ ID NO: 2137736 - DNA, 15 bp, Homo sapiens
gattttctcacttgg

SEQ ID NO: 2137737 - DNA, 15 bp, Homo sapiens
attttctcacttggt

SEQ ID NO: 2137738 - DNA, 15 bp, Homo sapiens
ttttctcacttggtg

SEQ ID NO: 2137739 - DNA, 15 bp, Homo sapiens
tttctcacttggtgc

SEQ ID NO: 2137740 - DNA, 15 bp, Homo sapiens
ttctcacttggtgct

SEQ ID NO: 2137741 - DNA, 15 bp, Homo sapiens
tctcacttggtgctg

SEQ ID NO: 2137742 - DNA, 15 bp, Homo sapiens
ctcacttggtgctgg

SEQ ID NO: 2137743 - DNA, 15 bp, Homo sapiens
tcacttggtgctggg

SEQ ID NO: 2137744 - DNA, 15 bp, Homo sapiens
cacttggtgctgggt

SEQ ID NO: 2137745 - DNA, 15 bp, Homo sapiens
acttggtgctgggta

SEQ ID NO: 2137746 - DNA, 15 bp, Homo sapiens
tggtgctgggtacta

SEQ ID NO: 2137747 - DNA, 15 bp, Homo sapiens
ggtgctgggtactag

SEQ ID NO: 2137748 - DNA, 15 bp, Homo sapiens
gtgctgggtactagg

SEQ ID NO: 2137749 - DNA, 15 bp, Homo sapiens
tgctgggtactaggt

SEQ ID NO: 2137750 - DNA, 15 bp, Homo sapiens
gctgggtactaggtt

SEQ ID NO: 2137751 - DNA, 15 bp, Homo sapiens
ctgggtactaggttt

SEQ ID NO: 2137752 - DNA, 15 bp, Homo sapiens
tgggtactaggttta

SEQ ID NO: 2137753 - DNA, 15 bp, Homo sapiens
gggtactaggtttat

SEQ ID NO: 2137754 - DNA, 15 bp, Homo sapiens
ggtactaggtttata

SEQ ID NO: 2137755 - DNA, 15 bp, Homo sapiens
gtactaggtttataa

SEQ ID NO: 2137756 - DNA, 15 bp, Homo sapiens
tactaggtttataaa

SEQ ID NO: 2137757 - DNA, 15 bp, Homo sapiens
actaggtttataaaa

SEQ ID NO: 2137758 - DNA, 15 bp, Homo sapiens
ctaggtttataaaat

SEQ ID NO: 2137759 - DNA, 15 bp, Homo sapiens
taggtttataaaatt

SEQ ID NO: 2137760 - DNA, 15 bp, Homo sapiens
aggtttataaaattg

SEQ ID NO: 2137761 - DNA, 15 bp, Homo sapiens
ggtttataaaattgt

SEQ ID NO: 2137762 - DNA, 15 bp, Homo sapiens
gtttataaaattgta

SEQ ID NO: 2137763 - DNA, 15 bp, Homo sapiens
tttataaaattgtat

SEQ ID NO: 2137764 - DNA, 15 bp, Homo sapiens
tataaaattgtatga

SEQ ID NO: 2137765 - DNA, 15 bp, Homo sapiens
ataaaattgtatgat

SEQ ID NO: 2137766 - DNA, 15 bp, Homo sapiens
taaaattgtatgata

SEQ ID NO: 2137767 - DNA, 15 bp, Homo sapiens
aaaattgtatgatag

SEQ ID NO: 2137768 - DNA, 15 bp, Homo sapiens
aaattgtatgatagt

SEQ ID NO: 2137769 - DNA, 15 bp, Homo sapiens
aattgtatgatagtt

SEQ ID NO: 2137770 - DNA, 15 bp, Homo sapiens
attgtatgatagtta

SEQ ID NO: 2137771 - DNA, 15 bp, Homo sapiens
ttgtatgatagttat

SEQ ID NO: 2137772 - DNA, 15 bp, Homo sapiens
tgtatgatagttatt

SEQ ID NO: 2137773 - DNA, 15 bp, Homo sapiens
gtatgatagttatta

SEQ ID NO: 2137774 - DNA, 15 bp, Homo sapiens
tatgatagttattat

SEQ ID NO: 2137775 - DNA, 15 bp, Homo sapiens
atgatagttattata

SEQ ID NO: 2137776 - DNA, 15 bp, Homo sapiens
tgatagttattatat

SEQ ID NO: 2137777 - DNA, 15 bp, Homo sapiens
gatagttattatatt

SEQ ID NO: 2137778 - DNA, 15 bp, Homo sapiens
atagttattatattg

SEQ ID NO: 2137779 - DNA, 15 bp, Homo sapiens
tagttattatattgt

SEQ ID NO: 2137780 - DNA, 15 bp, Homo sapiens
agttattatattgtg

SEQ ID NO: 2137781 - DNA, 15 bp, Homo sapiens
gttattatattgtgc

SEQ ID NO: 2137782 - DNA, 15 bp, Homo sapiens
ttattatattgtgca

SEQ ID NO: 2137783 - DNA, 15 bp, Homo sapiens
tattatattgtgcaa

SEQ ID NO: 2137784 - DNA, 15 bp, Homo sapiens
attatattgtgcaaa

SEQ ID NO: 2137785 - DNA, 15 bp, Homo sapiens
ttatattgtgcaaat

SEQ ID NO: 2137786 - DNA, 15 bp, Homo sapiens
tatattgtgcaaata

SEQ ID NO: 2137787 - DNA, 15 bp, Homo sapiens
atattgtgcaaataa

SEQ ID NO: 2137788 - DNA, 15 bp, Homo sapiens
tattgtgcaaataaa

SEQ ID NO: 2137789 - DNA, 15 bp, Homo sapiens
attgtgcaaataaag

SEQ ID NO: 2137790 - DNA, 15 bp, Homo sapiens
ttgtgcaaataaagt

SEQ ID NO: 2137791 - DNA, 15 bp, Homo sapiens
tgtgcaaataaagta

SEQ ID NO: 2137792 - DNA, 15 bp, Homo sapiens
gtgcaaataaagtag

SEQ ID NO: 2137793 - DNA, 15 bp, Homo sapiens
tgcaaataaagtagg

SEQ ID NO: 2137794 - DNA, 15 bp, Homo sapiens
gcaaataaagtagga

SEQ ID NO: 2137795 - DNA, 15 bp, Homo sapiens
caaataaagtaggaa

SEQ ID NO: 2137796 - DNA, 15 bp, Homo sapiens
aaataaagtaggaaa

SEQ ID NO: 2137797 - DNA, 15 bp, Homo sapiens
aataaagtaggaaaa

SEQ ID NO: 2137798 - DNA, 15 bp, Homo sapiens
ataaagtaggaaaat

SEQ ID NO: 2137799 - DNA, 15 bp, Homo sapiens
taaagtaggaaaatt

SEQ ID NO: 2137800 - DNA, 15 bp, Homo sapiens
aaagtaggaaaattt

SEQ ID NO: 2137801 - DNA, 15 bp, Homo sapiens
aagtaggaaaatttg

SEQ ID NO: 2137802 - DNA, 15 bp, Homo sapiens
agtaggaaaatttga

SEQ ID NO: 2137803 - DNA, 15 bp, Homo sapiens
gtaggaaaatttgaa

SEQ ID NO: 2137804 - DNA, 15 bp, Homo sapiens
taggaaaatttgaat

SEQ ID NO: 2137805 - DNA, 15 bp, Homo sapiens
aggaaaatttgaata

SEQ ID NO: 2137806 - DNA, 15 bp, Homo sapiens
ggaaaatttgaataa

SEQ ID NO: 2137807 - DNA, 15 bp, Homo sapiens
gaaaatttgaataac

SEQ ID NO: 2137808 - DNA, 15 bp, Homo sapiens
aaaatttgaataaca

SEQ ID NO: 2137809 - DNA, 15 bp, Homo sapiens
aaatttgaataacaa

SEQ ID NO: 2137810 - DNA, 15 bp, Homo sapiens
aatttgaataacaat

SEQ ID NO: 2137811 - DNA, 15 bp, Homo sapiens
atttgaataacaatg

SEQ ID NO: 2137812 - DNA, 15 bp, Homo sapiens
tttgaataacaatga

SEQ ID NO: 2137813 - DNA, 15 bp, Homo sapiens
ttgaataacaatgat

SEQ ID NO: 2137814 - DNA, 15 bp, Homo sapiens
tgaataacaatgatt

SEQ ID NO: 2137815 - DNA, 15 bp, Homo sapiens
gaataacaatgatta

SEQ ID NO: 2137816 - DNA, 15 bp, Homo sapiens
aataacaatgattat

SEQ ID NO: 2137817 - DNA, 15 bp, Homo sapiens
ataacaatgattatc

SEQ ID NO: 2137818 - DNA, 15 bp, Homo sapiens
taacaatgattatct

SEQ ID NO: 2137819 - DNA, 15 bp, Homo sapiens
aacaatgattatctt

SEQ ID NO: 2137820 - DNA, 15 bp, Homo sapiens
acaatgattatcttt

SEQ ID NO: 2137821 - DNA, 15 bp, Homo sapiens
caatgattatctttt

SEQ ID NO: 2137822 - DNA, 15 bp, Homo sapiens
aatgattatcttttg

SEQ ID NO: 2137823 - DNA, 15 bp, Homo sapiens
atgattatcttttga

SEQ ID NO: 2137824 - DNA, 15 bp, Homo sapiens
tgattatcttttgaa

SEQ ID NO: 2137825 - DNA, 15 bp, Homo sapiens
gattatcttttgaat

SEQ ID NO: 2137826 - DNA, 15 bp, Homo sapiens
attatcttttgaata

SEQ ID NO: 2137827 - DNA, 15 bp, Homo sapiens
ttatcttttgaatac

SEQ ID NO: 2137828 - DNA, 15 bp, Homo sapiens
tatcttttgaatacg

SEQ ID NO: 2137829 - DNA, 15 bp, Homo sapiens
atcttttgaatacgc

SEQ ID NO: 2137830 - DNA, 15 bp, Homo sapiens
tcttttgaatacgca

SEQ ID NO: 2137831 - DNA, 15 bp, Homo sapiens
cttttgaatacgcat

SEQ ID NO: 2137832 - DNA, 15 bp, Homo sapiens
ttttgaatacgcata

SEQ ID NO: 2137833 - DNA, 15 bp, Homo sapiens
tttgaatacgcatac

SEQ ID NO: 2137834 - DNA, 15 bp, Homo sapiens
ttgaatacgcatacg

SEQ ID NO: 2137835 - DNA, 15 bp, Homo sapiens
tgaatacgcatacgc

SEQ ID NO: 2137836 - DNA, 15 bp, Homo sapiens
gaatacgcatacgca

SEQ ID NO: 2137837 - DNA, 15 bp, Homo sapiens
aatacgcatacgcaa

SEQ ID NO: 2137838 - DNA, 15 bp, Homo sapiens
atacgcatacgcaag

SEQ ID NO: 2137839 - DNA, 15 bp, Homo sapiens
tacgcatacgcaagg

SEQ ID NO: 2137840 - DNA, 15 bp, Homo sapiens
acgcatacgcaaggg

SEQ ID NO: 2137841 - DNA, 15 bp, Homo sapiens
cgcatacgcaaggga

SEQ ID NO: 2137842 - DNA, 15 bp, Homo sapiens
gcatacgcaagggat

SEQ ID NO: 2137843 - DNA, 15 bp, Homo sapiens
catacgcaagggatt

SEQ ID NO: 2137844 - DNA, 15 bp, Homo sapiens
atacgcaagggattg

SEQ ID NO: 2137845 - DNA, 15 bp, Homo sapiens
tacgcaagggattgg

SEQ ID NO: 2137846 - DNA, 15 bp, Homo sapiens
acgcaagggattggt

SEQ ID NO: 2137847 - DNA, 15 bp, Homo sapiens
cgcaagggattggtt

SEQ ID NO: 2137848 - DNA, 15 bp, Homo sapiens
gcaagggattggttg

SEQ ID NO: 2137849 - DNA, 15 bp, Homo sapiens
caagggattggttgt

SEQ ID NO: 2137850 - DNA, 15 bp, Homo sapiens
aagggattggttgtc

SEQ ID NO: 2137851 - DNA, 15 bp, Homo sapiens
agggattggttgtct

SEQ ID NO: 2137852 - DNA, 15 bp, Homo sapiens
gggattggttgtctg

SEQ ID NO: 2137853 - DNA, 15 bp, Homo sapiens
ggattggttgtctga

SEQ ID NO: 2137854 - DNA, 15 bp, Homo sapiens
gattggttgtctgaa

SEQ ID NO: 2137855 - DNA, 15 bp, Homo sapiens
attggttgtctgaag

SEQ ID NO: 2137856 - DNA, 15 bp, Homo sapiens
ttggttgtctgaaga

SEQ ID NO: 2137857 - DNA, 15 bp, Homo sapiens
tggttgtctgaagaa

SEQ ID NO: 2137858 - DNA, 15 bp, Homo sapiens
ggttgtctgaagaat

SEQ ID NO: 2137859 - DNA, 15 bp, Homo sapiens
gttgtctgaagaatg

SEQ ID NO: 2137860 - DNA, 15 bp, Homo sapiens
ttgtctgaagaatgc

SEQ ID NO: 2137861 - DNA, 15 bp, Homo sapiens
tgtctgaagaatgcc

SEQ ID NO: 2137862 - DNA, 15 bp, Homo sapiens
gtctgaagaatgcca

SEQ ID NO: 2137863 - DNA, 15 bp, Homo sapiens
tctgaagaatgccac

SEQ ID NO: 2137864 - DNA, 15 bp, Homo sapiens
ctgaagaatgccact

SEQ ID NO: 2137865 - DNA, 15 bp, Homo sapiens
tgaagaatgccacta

SEQ ID NO: 2137866 - DNA, 15 bp, Homo sapiens
gaagaatgccactat

SEQ ID NO: 2137867 - DNA, 15 bp, Homo sapiens
aagaatgccactata

SEQ ID NO: 2137868 - DNA, 15 bp, Homo sapiens
agaatgccactatag

SEQ ID NO: 2137869 - DNA, 15 bp, Homo sapiens
gaatgccactatagt

SEQ ID NO: 2137870 - DNA, 15 bp, Homo sapiens
aatgccactatagta

SEQ ID NO: 2137871 - DNA, 15 bp, Homo sapiens
atgccactatagtag

SEQ ID NO: 2137872 - DNA, 15 bp, Homo sapiens
tgccactatagtagt

SEQ ID NO: 2137873 - DNA, 15 bp, Homo sapiens
gccactatagtagtt

SEQ ID NO: 2137874 - DNA, 15 bp, Homo sapiens
ccactatagtagtta

SEQ ID NO: 2137875 - DNA, 15 bp, Homo sapiens
cactatagtagttat

SEQ ID NO: 2137876 - DNA, 15 bp, Homo sapiens
actatagtagttatc

SEQ ID NO: 2137877 - DNA, 15 bp, Homo sapiens
ctatagtagttatct

SEQ ID NO: 2137878 - DNA, 15 bp, Homo sapiens
tatagtagttatcta

SEQ ID NO: 2137879 - DNA, 15 bp, Homo sapiens
atagtagttatctat

SEQ ID NO: 2137880 - DNA, 15 bp, Homo sapiens
tagtagttatctatt

SEQ ID NO: 2137881 - DNA, 15 bp, Homo sapiens
agtagttatctattg

SEQ ID NO: 2137882 - DNA, 15 bp, Homo sapiens
gtagttatctattgt

SEQ ID NO: 2137883 - DNA, 15 bp, Homo sapiens
tagttatctattgtg

SEQ ID NO: 2137884 - DNA, 15 bp, Homo sapiens
agttatctattgtgt

SEQ ID NO: 2137885 - DNA, 15 bp, Homo sapiens
gttatctattgtgtg

SEQ ID NO: 2137886 - DNA, 15 bp, Homo sapiens
ttatctattgtgtgc

SEQ ID NO: 2137887 - DNA, 15 bp, Homo sapiens
tatctattgtgtgcc

SEQ ID NO: 2137888 - DNA, 15 bp, Homo sapiens
atctattgtgtgcca

SEQ ID NO: 2137889 - DNA, 15 bp, Homo sapiens
tctattgtgtgccaa

SEQ ID NO: 2137890 - DNA, 15 bp, Homo sapiens
ctattgtgtgccaat

SEQ ID NO: 2137891 - DNA, 15 bp, Homo sapiens
tattgtgtgccaatc

SEQ ID NO: 2137892 - DNA, 15 bp, Homo sapiens
attgtgtgccaatct

SEQ ID NO: 2137893 - DNA, 15 bp, Homo sapiens
ttgtgtgccaatctc

SEQ ID NO: 2137894 - DNA, 15 bp, Homo sapiens
tgtgtgccaatctca

SEQ ID NO: 2137895 - DNA, 15 bp, Homo sapiens
gtgtgccaatctcat

SEQ ID NO: 2137896 - DNA, 15 bp, Homo sapiens
tgtgccaatctcatt

SEQ ID NO: 2137897 - DNA, 15 bp, Homo sapiens
gtgccaatctcattg

SEQ ID NO: 2137898 - DNA, 15 bp, Homo sapiens
tgccaatctcattgc

SEQ ID NO: 2137899 - DNA, 15 bp, Homo sapiens
gccaatctcattgct

SEQ ID NO: 2137900 - DNA, 15 bp, Homo sapiens
ccaatctcattgcta

SEQ ID NO: 2137901 - DNA, 15 bp, Homo sapiens
caatctcattgctag

SEQ ID NO: 2137902 - DNA, 15 bp, Homo sapiens
aatctcattgctagg

SEQ ID NO: 2137903 - DNA, 15 bp, Homo sapiens
atctcattgctaggc

SEQ ID NO: 2137904 - DNA, 15 bp, Homo sapiens
tctcattgctaggca

SEQ ID NO: 2137905 - DNA, 15 bp, Homo sapiens
ctcattgctaggcat

SEQ ID NO: 2137906 - DNA, 15 bp, Homo sapiens
tcattgctaggcatt

SEQ ID NO: 2137907 - DNA, 15 bp, Homo sapiens
cattgctaggcattg

SEQ ID NO: 2137908 - DNA, 15 bp, Homo sapiens
attgctaggcattgg

SEQ ID NO: 2137909 - DNA, 15 bp, Homo sapiens
ttgctaggcattggg

SEQ ID NO: 2137910 - DNA, 15 bp, Homo sapiens
tgctaggcattgggg

SEQ ID NO: 2137911 - DNA, 15 bp, Homo sapiens
gctaggcattgggga

SEQ ID NO: 2137912 - DNA, 15 bp, Homo sapiens
ctaggcattggggat

SEQ ID NO: 2137913 - DNA, 15 bp, Homo sapiens
taggcattggggatg

SEQ ID NO: 2137914 - DNA, 15 bp, Homo sapiens
aggcattggggatgc

SEQ ID NO: 2137915 - DNA, 15 bp, Homo sapiens
ggcattggggatgca

SEQ ID NO: 2137916 - DNA, 15 bp, Homo sapiens
gcattggggatgcaa

SEQ ID NO: 2137917 - DNA, 15 bp, Homo sapiens
cattggggatgcaaa

SEQ ID NO: 2137918 - DNA, 15 bp, Homo sapiens
attggggatgcaaag

SEQ ID NO: 2137919 - DNA, 15 bp, Homo sapiens
ttggggatgcaaaga

SEQ ID NO: 2137920 - DNA, 15 bp, Homo sapiens
tggggatgcaaagat

SEQ ID NO: 2137921 - DNA, 15 bp, Homo sapiens
ggggatgcaaagata

SEQ ID NO: 2137922 - DNA, 15 bp, Homo sapiens
gggatgcaaagataa

SEQ ID NO: 2137923 - DNA, 15 bp, Homo sapiens
ggatgcaaagataaa

SEQ ID NO: 2137924 - DNA, 15 bp, Homo sapiens
gatgcaaagataaac

SEQ ID NO: 2137925 - DNA, 15 bp, Homo sapiens
atgcaaagataaacc

SEQ ID NO: 2137926 - DNA, 15 bp, Homo sapiens
tgcaaagataaacca

SEQ ID NO: 2137927 - DNA, 15 bp, Homo sapiens
gcaaagataaaccat

SEQ ID NO: 2137928 - DNA, 15 bp, Homo sapiens
caaagataaaccatc

SEQ ID NO: 2137929 - DNA, 15 bp, Homo sapiens
aaagataaaccatct

SEQ ID NO: 2137930 - DNA, 15 bp, Homo sapiens
aagataaaccatctt

SEQ ID NO: 2137931 - DNA, 15 bp, Homo sapiens
agataaaccatcttt

SEQ ID NO: 2137932 - DNA, 15 bp, Homo sapiens
gataaaccatcttta

SEQ ID NO: 2137933 - DNA, 15 bp, Homo sapiens
ataaaccatctttat

SEQ ID NO: 2137934 - DNA, 15 bp, Homo sapiens
taaaccatctttatt

SEQ ID NO: 2137935 - DNA, 15 bp, Homo sapiens
aaaccatctttattg

SEQ ID NO: 2137936 - DNA, 15 bp, Homo sapiens
aaccatctttattgt

SEQ ID NO: 2137937 - DNA, 15 bp, Homo sapiens
accatctttattgtg

SEQ ID NO: 2137938 - DNA, 15 bp, Homo sapiens
ccatctttattgtgt

SEQ ID NO: 2137939 - DNA, 15 bp, Homo sapiens
catctttattgtgtc

SEQ ID NO: 2137940 - DNA, 15 bp, Homo sapiens
atctttattgtgtct

SEQ ID NO: 2137941 - DNA, 15 bp, Homo sapiens
tctttattgtgtctt

SEQ ID NO: 2137942 - DNA, 15 bp, Homo sapiens
ctttattgtgtcttg

SEQ ID NO: 2137943 - DNA, 15 bp, Homo sapiens
tttattgtgtcttgg

SEQ ID NO: 2137944 - DNA, 15 bp, Homo sapiens
ttattgtgtcttggg

SEQ ID NO: 2137945 - DNA, 15 bp, Homo sapiens
tattgtgtcttgggt

SEQ ID NO: 2137946 - DNA, 15 bp, Homo sapiens
attgtgtcttgggta

SEQ ID NO: 2137947 - DNA, 15 bp, Homo sapiens
ttgtgtcttgggtag

SEQ ID NO: 2137948 - DNA, 15 bp, Homo sapiens
tgtgtcttgggtagc

SEQ ID NO: 2137949 - DNA, 15 bp, Homo sapiens
gtgtcttgggtagca

SEQ ID NO: 2137950 - DNA, 15 bp, Homo sapiens
tgtcttgggtagcag

SEQ ID NO: 2137951 - DNA, 15 bp, Homo sapiens
gtcttgggtagcaga

SEQ ID NO: 2137952 - DNA, 15 bp, Homo sapiens
tcttgggtagcagaa

SEQ ID NO: 2137953 - DNA, 15 bp, Homo sapiens
cttgggtagcagaag

SEQ ID NO: 2137954 - DNA, 15 bp, Homo sapiens
ttgggtagcagaaga

SEQ ID NO: 2137955 - DNA, 15 bp, Homo sapiens
tgggtagcagaagaa

SEQ ID NO: 2137956 - DNA, 15 bp, Homo sapiens
gggtagcagaagaaa

SEQ ID NO: 2137957 - DNA, 15 bp, Homo sapiens
ggtagcagaagaaaa

SEQ ID NO: 2137958 - DNA, 15 bp, Homo sapiens
gtagcagaagaaaat

SEQ ID NO: 2137959 - DNA, 15 bp, Homo sapiens
tagcagaagaaaata

SEQ ID NO: 2137960 - DNA, 15 bp, Homo sapiens
agcagaagaaaatat

SEQ ID NO: 2137961 - DNA, 15 bp, Homo sapiens
gcagaagaaaatatg

SEQ ID NO: 2137962 - DNA, 15 bp, Homo sapiens
cagaagaaaatatgt

SEQ ID NO: 2137963 - DNA, 15 bp, Homo sapiens
agaagaaaatatgtg

SEQ ID NO: 2137964 - DNA, 15 bp, Homo sapiens
gaagaaaatatgtgt

SEQ ID NO: 2137965 - DNA, 15 bp, Homo sapiens
aagaaaatatgtgta

SEQ ID NO: 2137966 - DNA, 15 bp, Homo sapiens
gatatgttcgatact

SEQ ID NO: 2137967 - DNA, 15 bp, Homo sapiens
atatgttcgatacta

SEQ ID NO: 2137968 - DNA, 15 bp, Homo sapiens
tatgttcgatactaa

SEQ ID NO: 2137969 - DNA, 15 bp, Homo sapiens
atgttcgatactaag

SEQ ID NO: 2137970 - DNA, 15 bp, Homo sapiens
tgttcgatactaagg

SEQ ID NO: 2137971 - DNA, 15 bp, Homo sapiens
gttcgatactaagga

SEQ ID NO: 2137972 - DNA, 15 bp, Homo sapiens
ttcgatactaaggaa

SEQ ID NO: 2137973 - DNA, 15 bp, Homo sapiens
tcgatactaaggaaa

SEQ ID NO: 2137974 - DNA, 15 bp, Homo sapiens
cgatactaaggaaaa

SEQ ID NO: 2137975 - DNA, 15 bp, Homo sapiens
gatactaaggaaaaa

SEQ ID NO: 2137976 - DNA, 15 bp, Homo sapiens
atactaaggaaaaac

SEQ ID NO: 2137977 - DNA, 15 bp, Homo sapiens
tactaaggaaaaact

SEQ ID NO: 2137978 - DNA, 15 bp, Homo sapiens
actaaggaaaaacta

SEQ ID NO: 2137979 - DNA, 15 bp, Homo sapiens
ctaaggaaaaactaa

SEQ ID NO: 2137980 - DNA, 15 bp, Homo sapiens
taaggaaaaactaaa

SEQ ID NO: 2137981 - DNA, 15 bp, Homo sapiens
aaggaaaaactaaac

SEQ ID NO: 2137982 - DNA, 15 bp, Homo sapiens
aggaaaaactaaaca

SEQ ID NO: 2137983 - DNA, 15 bp, Homo sapiens
ggaaaaactaaacag

SEQ ID NO: 2137984 - DNA, 15 bp, Homo sapiens
gaaaaactaaacaga

SEQ ID NO: 2137985 - DNA, 15 bp, Homo sapiens
aaaaactaaacagat

SEQ ID NO: 2137986 - DNA, 15 bp, Homo sapiens
aaaactaaacagatc

SEQ ID NO: 2137987 - DNA, 15 bp, Homo sapiens
aaactaaacagatca

SEQ ID NO: 2137988 - DNA, 15 bp, Homo sapiens
aactaaacagatcac

SEQ ID NO: 2137989 - DNA, 15 bp, Homo sapiens
actaaacagatcacc

SEQ ID NO: 2137990 - DNA, 15 bp, Homo sapiens
ctaaacagatcacct

SEQ ID NO: 2137991 - DNA, 15 bp, Homo sapiens
taaacagatcacctt

SEQ ID NO: 2137992 - DNA, 15 bp, Homo sapiens
aaacagatcaccttt

SEQ ID NO: 2137993 - DNA, 15 bp, Homo sapiens
aacagatcacctttg

SEQ ID NO: 2137994 - DNA, 15 bp, Homo sapiens
acagatcacctttga

SEQ ID NO: 2137995 - DNA, 15 bp, Homo sapiens
cagatcacctttgac

SEQ ID NO: 2137996 - DNA, 15 bp, Homo sapiens
agatcacctttgaca

SEQ ID NO: 2137997 - DNA, 15 bp, Homo sapiens
gatcacctttgacat

SEQ ID NO: 2137998 - DNA, 15 bp, Homo sapiens
atcacctttgacatg

SEQ ID NO: 2137999 - DNA, 15 bp, Homo sapiens
tcacctttgacatgc

SEQ ID NO: 2138000 - DNA, 15 bp, Homo sapiens
cacctttgacatgcg

SEQ ID NO: 2138001 - DNA, 15 bp, Homo sapiens
acctttgacatgcgt

SEQ ID NO: 2138002 - DNA, 15 bp, Homo sapiens
atctcaaccattttg

SEQ ID NO: 2138003 - DNA, 15 bp, Homo sapiens
tctcaaccattttgt

SEQ ID NO: 2138004 - DNA, 15 bp, Homo sapiens
ctcaaccattttgtt

SEQ ID NO: 2138005 - DNA, 15 bp, Homo sapiens
tcaaccattttgtta

SEQ ID NO: 2138006 - DNA, 15 bp, Homo sapiens
caaccattttgttaa

SEQ ID NO: 2138007 - DNA, 15 bp, Homo sapiens
aaccattttgttaaa

SEQ ID NO: 2138008 - DNA, 15 bp, Homo sapiens
accattttgttaaat

SEQ ID NO: 2138009 - DNA, 15 bp, Homo sapiens
ccattttgttaaatc

SEQ ID NO: 2138010 - DNA, 15 bp, Homo sapiens
cattttgttaaatcc

SEQ ID NO: 2138011 - DNA, 15 bp, Homo sapiens
attttgttaaatcct

SEQ ID NO: 2138012 - DNA, 15 bp, Homo sapiens
ttttgttaaatccta

SEQ ID NO: 2138013 - DNA, 15 bp, Homo sapiens
tttgttaaatcctaa

SEQ ID NO: 2138014 - DNA, 15 bp, Homo sapiens
ttgttaaatcctaaa

SEQ ID NO: 2138015 - DNA, 15 bp, Homo sapiens
tgttaaatcctaaac

SEQ ID NO: 2138016 - DNA, 15 bp, Homo sapiens
gttaaatcctaaaca

SEQ ID NO: 2138017 - DNA, 15 bp, Homo sapiens
ttaaatcctaaacag

SEQ ID NO: 2138018 - DNA, 15 bp, Homo sapiens
taaatcctaaacaga

SEQ ID NO: 2138019 - DNA, 15 bp, Homo sapiens
aaatcctaaacagaa

SEQ ID NO: 2138020 - DNA, 15 bp, Homo sapiens
aatcctaaacagaaa

SEQ ID NO: 2138021 - DNA, 15 bp, Homo sapiens
atcctaaacagaaaa

SEQ ID NO: 2138022 - DNA, 15 bp, Homo sapiens
tcctaaacagaaaac

SEQ ID NO: 2138023 - DNA, 15 bp, Homo sapiens
cctaaacagaaaaca

SEQ ID NO: 2138024 - DNA, 15 bp, Homo sapiens
ctaaacagaaaacaa

SEQ ID NO: 2138025 - DNA, 15 bp, Homo sapiens
taaacagaaaacaaa

SEQ ID NO: 2138026 - DNA, 15 bp, Homo sapiens
aaacagaaaacaaaa

SEQ ID NO: 2138027 - DNA, 15 bp, Homo sapiens
aacagaaaacaaaaa

SEQ ID NO: 2138028 - DNA, 15 bp, Homo sapiens
acagaaaacaaaaaa

SEQ ID NO: 2138029 - DNA, 15 bp, Homo sapiens
cagaaaacaaaaaaa

SEQ ID NO: 2138030 - DNA, 15 bp, Homo sapiens
agaaaacaaaaaaaa

SEQ ID NO: 2138031 - DNA, 15 bp, Homo sapiens
gaaaacaaaaaaaat

SEQ ID NO: 2138032 - DNA, 15 bp, Homo sapiens
aaaacaaaaaaaatc

SEQ ID NO: 2138033 - DNA, 15 bp, Homo sapiens
aaacaaaaaaaatca

SEQ ID NO: 2138034 - DNA, 15 bp, Homo sapiens
aacaaaaaaaatcat

SEQ ID NO: 2138035 - DNA, 15 bp, Homo sapiens
acaaaaaaaatcatg

SEQ ID NO: 2138036 - DNA, 15 bp, Homo sapiens
caaaaaaaatcatga

SEQ ID NO: 2138037 - DNA, 15 bp, Homo sapiens
aaaaaaaatcatgac

SEQ ID NO: 2138038 - DNA, 15 bp, Homo sapiens
aaaaaaatcatgacg

SEQ ID NO: 2138039 - DNA, 15 bp, Homo sapiens
aaaaaatcatgacga

SEQ ID NO: 2138040 - DNA, 15 bp, Homo sapiens
aaaaatcatgacgaa

SEQ ID NO: 2138041 - DNA, 15 bp, Homo sapiens
aaaatcatgacgaaa

SEQ ID NO: 2138042 - DNA, 15 bp, Homo sapiens
aaatcatgacgaaaa

SEQ ID NO: 2138043 - DNA, 15 bp, Homo sapiens
aatcatgacgaaaag

SEQ ID NO: 2138044 - DNA, 15 bp, Homo sapiens
atcatgacgaaaaga

SEQ ID NO: 2138045 - DNA, 15 bp, Homo sapiens
tcatgacgaaaagac

SEQ ID NO: 2138046 - DNA, 15 bp, Homo sapiens
catgacgaaaagaca

SEQ ID NO: 2138047 - DNA, 15 bp, Homo sapiens
atgacgaaaagacac

SEQ ID NO: 2138048 - DNA, 15 bp, Homo sapiens
tgacgaaaagacact

SEQ ID NO: 2138049 - DNA, 15 bp, Homo sapiens
gacgaaaagacactt

SEQ ID NO: 2138050 - DNA, 15 bp, Homo sapiens
acgaaaagacacttg

SEQ ID NO: 2138051 - DNA, 15 bp, Homo sapiens
cgaaaagacacttgc

SEQ ID NO: 2138052 - DNA, 15 bp, Homo sapiens
gaaaagacacttgct

SEQ ID NO: 2138053 - DNA, 15 bp, Homo sapiens
aaaagacacttgctt

SEQ ID NO: 2138054 - DNA, 15 bp, Homo sapiens
aaagacacttgctta

SEQ ID NO: 2138055 - DNA, 15 bp, Homo sapiens
aagacacttgcttat

SEQ ID NO: 2138056 - DNA, 15 bp, Homo sapiens
agacacttgcttatt

SEQ ID NO: 2138057 - DNA, 15 bp, Homo sapiens
gacacttgcttatta

SEQ ID NO: 2138058 - DNA, 15 bp, Homo sapiens
acacttgcttattaa

SEQ ID NO: 2138059 - DNA, 15 bp, Homo sapiens
cacttgcttattaat

SEQ ID NO: 2138060 - DNA, 15 bp, Homo sapiens
acttgcttattaatt

SEQ ID NO: 2138061 - DNA, 15 bp, Homo sapiens
cttgcttattaattg

SEQ ID NO: 2138062 - DNA, 15 bp, Homo sapiens
ttgcttattaattgg

SEQ ID NO: 2138063 - DNA, 15 bp, Homo sapiens
tgcttattaattggc

SEQ ID NO: 2138064 - DNA, 15 bp, Homo sapiens
gcttattaattggct

SEQ ID NO: 2138065 - DNA, 15 bp, Homo sapiens
cttattaattggctt

SEQ ID NO: 2138066 - DNA, 15 bp, Homo sapiens
ttattaattggcttg

SEQ ID NO: 2138067 - DNA, 15 bp, Homo sapiens
tattaattggcttgg

SEQ ID NO: 2138068 - DNA, 15 bp, Homo sapiens
attaattggcttgga

SEQ ID NO: 2138069 - DNA, 15 bp, Homo sapiens
ttaattggcttggaa

SEQ ID NO: 2138070 - DNA, 15 bp, Homo sapiens
taattggcttggaaa

SEQ ID NO: 2138071 - DNA, 15 bp, Homo sapiens
aattggcttggaaag

SEQ ID NO: 2138072 - DNA, 15 bp, Homo sapiens
attggcttggaaagt

SEQ ID NO: 2138073 - DNA, 15 bp, Homo sapiens
ttggcttggaaagta

SEQ ID NO: 2138074 - DNA, 15 bp, Homo sapiens
tggcttggaaagtag

SEQ ID NO: 2138075 - DNA, 15 bp, Homo sapiens
ggcttggaaagtaga

SEQ ID NO: 2138076 - DNA, 15 bp, Homo sapiens
gcttggaaagtagaa

SEQ ID NO: 2138077 - DNA, 15 bp, Homo sapiens
cttggaaagtagaat

SEQ ID NO: 2138078 - DNA, 15 bp, Homo sapiens
ttggaaagtagaata

SEQ ID NO: 2138079 - DNA, 15 bp, Homo sapiens
tggaaagtagaatat

SEQ ID NO: 2138080 - DNA, 15 bp, Homo sapiens
ggaaagtagaatata

SEQ ID NO: 2138081 - DNA, 15 bp, Homo sapiens
gaaagtagaatatag

SEQ ID NO: 2138082 - DNA, 15 bp, Homo sapiens
aaagtagaatatagg

SEQ ID NO: 2138083 - DNA, 15 bp, Homo sapiens
aagtagaatatagga

SEQ ID NO: 2138084 - DNA, 15 bp, Homo sapiens
agtagaatataggag

SEQ ID NO: 2138085 - DNA, 15 bp, Homo sapiens
gtagaatataggaga

SEQ ID NO: 2138086 - DNA, 15 bp, Homo sapiens
tagaatataggagaa

SEQ ID NO: 2138087 - DNA, 15 bp, Homo sapiens
agaatataggagaaa

SEQ ID NO: 2138088 - DNA, 15 bp, Homo sapiens
gaatataggagaaag

SEQ ID NO: 2138089 - DNA, 15 bp, Homo sapiens
aatataggagaaagg

SEQ ID NO: 2138090 - DNA, 15 bp, Homo sapiens
atataggagaaaggt

SEQ ID NO: 2138091 - DNA, 15 bp, Homo sapiens
tataggagaaaggtt

SEQ ID NO: 2138092 - DNA, 15 bp, Homo sapiens
ataggagaaaggtta

SEQ ID NO: 2138093 - DNA, 15 bp, Homo sapiens
taggagaaaggttac

SEQ ID NO: 2138094 - DNA, 15 bp, Homo sapiens
aggagaaaggttact

SEQ ID NO: 2138095 - DNA, 15 bp, Homo sapiens
ggagaaaggttactg

SEQ ID NO: 2138096 - DNA, 15 bp, Homo sapiens
gagaaaggttactgt

SEQ ID NO: 2138097 - DNA, 15 bp, Homo sapiens
agaaaggttactgtt

SEQ ID NO: 2138098 - DNA, 15 bp, Homo sapiens
gaaaggttactgttt

SEQ ID NO: 2138099 - DNA, 15 bp, Homo sapiens
aaaggttactgttta

SEQ ID NO: 2138100 - DNA, 15 bp, Homo sapiens
aaggttactgtttat

SEQ ID NO: 2138101 - DNA, 15 bp, Homo sapiens
aggttactgtttatt

SEQ ID NO: 2138102 - DNA, 15 bp, Homo sapiens
ggttactgtttattt

SEQ ID NO: 2138103 - DNA, 15 bp, Homo sapiens
gttactgtttatttt

SEQ ID NO: 2138104 - DNA, 15 bp, Homo sapiens
ttactgtttattttt

SEQ ID NO: 2138105 - DNA, 15 bp, Homo sapiens
tactgtttatttttt

SEQ ID NO: 2138106 - DNA, 15 bp, Homo sapiens
actgtttattttttt

SEQ ID NO: 2138107 - DNA, 15 bp, Homo sapiens
ctgtttatttttttt

SEQ ID NO: 2138108 - DNA, 15 bp, Homo sapiens
tgtttattttttttc

SEQ ID NO: 2138109 - DNA, 15 bp, Homo sapiens
gtttattttttttca

SEQ ID NO: 2138110 - DNA, 15 bp, Homo sapiens
tttattttttttcat

SEQ ID NO: 2138111 - DNA, 15 bp, Homo sapiens
attttttttcatgta

SEQ ID NO: 2138112 - DNA, 15 bp, Homo sapiens
ttttttttcatgtat

SEQ ID NO: 2138113 - DNA, 15 bp, Homo sapiens
tttttttcatgtatt

SEQ ID NO: 2138114 - DNA, 15 bp, Homo sapiens
ttttttcatgtattc

SEQ ID NO: 2138115 - DNA, 15 bp, Homo sapiens
tttttcatgtattca

SEQ ID NO: 2138116 - DNA, 15 bp, Homo sapiens
ttttcatgtattcat

SEQ ID NO: 2138117 - DNA, 15 bp, Homo sapiens
tttcatgtattcatt

SEQ ID NO: 2138118 - DNA, 15 bp, Homo sapiens
ttcatgtattcattc

SEQ ID NO: 2138119 - DNA, 15 bp, Homo sapiens
tcatgtattcattca

SEQ ID NO: 2138120 - DNA, 15 bp, Homo sapiens
catgtattcattcat

SEQ ID NO: 2138121 - DNA, 15 bp, Homo sapiens
atgtattcattcatt

SEQ ID NO: 2138122 - DNA, 15 bp, Homo sapiens
tgtattcattcattc

SEQ ID NO: 2138123 - DNA, 15 bp, Homo sapiens
gtattcattcattct

SEQ ID NO: 2138124 - DNA, 15 bp, Homo sapiens
tattcattcattcta

SEQ ID NO: 2138125 - DNA, 15 bp, Homo sapiens
attcattcattctac

SEQ ID NO: 2138126 - DNA, 15 bp, Homo sapiens
ttcattcattctaca

SEQ ID NO: 2138127 - DNA, 15 bp, Homo sapiens
tcattcattctacaa

SEQ ID NO: 2138128 - DNA, 15 bp, Homo sapiens
cattcattctacaaa

SEQ ID NO: 2138129 - DNA, 15 bp, Homo sapiens
attcattctacaaat

SEQ ID NO: 2138130 - DNA, 15 bp, Homo sapiens
ttcattctacaaata

SEQ ID NO: 2138131 - DNA, 15 bp, Homo sapiens
tcattctacaaatat

SEQ ID NO: 2138132 - DNA, 15 bp, Homo sapiens
cattctacaaatata

SEQ ID NO: 2138133 - DNA, 15 bp, Homo sapiens
attctacaaatatat

SEQ ID NO: 2138134 - DNA, 15 bp, Homo sapiens
ttctacaaatatatt

SEQ ID NO: 2138135 - DNA, 15 bp, Homo sapiens
tctacaaatatattc

SEQ ID NO: 2138136 - DNA, 15 bp, Homo sapiens
ctacaaatatattcg

SEQ ID NO: 2138137 - DNA, 15 bp, Homo sapiens
tacaaatatattcgg

SEQ ID NO: 2138138 - DNA, 15 bp, Homo sapiens
acaaatatattcggg

SEQ ID NO: 2138139 - DNA, 15 bp, Homo sapiens
caaatatattcgggt

SEQ ID NO: 2138140 - DNA, 15 bp, Homo sapiens
aaatatattcgggtg

SEQ ID NO: 2138141 - DNA, 15 bp, Homo sapiens
aatatattcgggtgc

SEQ ID NO: 2138142 - DNA, 15 bp, Homo sapiens
atatattcgggtgcc

SEQ ID NO: 2138143 - DNA, 15 bp, Homo sapiens
tatattcgggtgcca

SEQ ID NO: 2138144 - DNA, 15 bp, Homo sapiens
atattcgggtgccaa

SEQ ID NO: 2138145 - DNA, 15 bp, Homo sapiens
tattcgggtgccaat

SEQ ID NO: 2138146 - DNA, 15 bp, Homo sapiens
attcgggtgccaata

SEQ ID NO: 2138147 - DNA, 15 bp, Homo sapiens
ttcgggtgccaatag

SEQ ID NO: 2138148 - DNA, 15 bp, Homo sapiens
tcgggtgccaatagg

SEQ ID NO: 2138149 - DNA, 15 bp, Homo sapiens
cgggtgccaataggt

SEQ ID NO: 2138150 - DNA, 15 bp, Homo sapiens
gggtgccaataggta

SEQ ID NO: 2138151 - DNA, 15 bp, Homo sapiens
ggtgccaataggtac

SEQ ID NO: 2138152 - DNA, 15 bp, Homo sapiens
gtgccaataggtact

SEQ ID NO: 2138153 - DNA, 15 bp, Homo sapiens
tgccaataggtactt

SEQ ID NO: 2138154 - DNA, 15 bp, Homo sapiens
gccaataggtacttg

SEQ ID NO: 2138155 - DNA, 15 bp, Homo sapiens
ccaataggtacttgg

SEQ ID NO: 2138156 - DNA, 15 bp, Homo sapiens
caataggtacttggt

SEQ ID NO: 2138157 - DNA, 15 bp, Homo sapiens
aataggtacttggta

SEQ ID NO: 2138158 - DNA, 15 bp, Homo sapiens
ataggtacttggtat

SEQ ID NO: 2138159 - DNA, 15 bp, Homo sapiens
taggtacttggtata

SEQ ID NO: 2138160 - DNA, 15 bp, Homo sapiens
aggtacttggtataa

SEQ ID NO: 2138161 - DNA, 15 bp, Homo sapiens
ggtacttggtataag

SEQ ID NO: 2138162 - DNA, 15 bp, Homo sapiens
gtacttggtataagg

SEQ ID NO: 2138163 - DNA, 15 bp, Homo sapiens
tacttggtataaggt

SEQ ID NO: 2138164 - DNA, 15 bp, Homo sapiens
acttggtataaggtt

SEQ ID NO: 2138165 - DNA, 15 bp, Homo sapiens
cttggtataaggttt

SEQ ID NO: 2138166 - DNA, 15 bp, Homo sapiens
ttggtataaggtttt

SEQ ID NO: 2138167 - DNA, 15 bp, Homo sapiens
tggtataaggttttt

SEQ ID NO: 2138168 - DNA, 15 bp, Homo sapiens
ggtataaggtttttg

SEQ ID NO: 2138169 - DNA, 15 bp, Homo sapiens
gtataaggtttttgg

SEQ ID NO: 2138170 - DNA, 15 bp, Homo sapiens
tataaggtttttggc

SEQ ID NO: 2138171 - DNA, 15 bp, Homo sapiens
ataaggtttttggcc

SEQ ID NO: 2138172 - DNA, 15 bp, Homo sapiens
taaggtttttggccc

SEQ ID NO: 2138173 - DNA, 15 bp, Homo sapiens
aaggtttttggcccc

SEQ ID NO: 2138174 - DNA, 15 bp, Homo sapiens
aggtttttggcccca

SEQ ID NO: 2138175 - DNA, 15 bp, Homo sapiens
ggtttttggccccag

SEQ ID NO: 2138176 - DNA, 15 bp, Homo sapiens
gtttttggccccaga

SEQ ID NO: 2138177 - DNA, 15 bp, Homo sapiens
tttttggccccagag

SEQ ID NO: 2138178 - DNA, 15 bp, Homo sapiens
ttttggccccagaga

SEQ ID NO: 2138179 - DNA, 15 bp, Homo sapiens
tttggccccagagac

SEQ ID NO: 2138180 - DNA, 15 bp, Homo sapiens
ttggccccagagaca

SEQ ID NO: 2138181 - DNA, 15 bp, Homo sapiens
tggccccagagacat

SEQ ID NO: 2138182 - DNA, 15 bp, Homo sapiens
ggccccagagacatg

SEQ ID NO: 2138183 - DNA, 15 bp, Homo sapiens
gccccagagacatgg

SEQ ID NO: 2138184 - DNA, 15 bp, Homo sapiens
ccccagagacatggg

SEQ ID NO: 2138185 - DNA, 15 bp, Homo sapiens
cccagagacatggga

SEQ ID NO: 2138186 - DNA, 15 bp, Homo sapiens
ccagagacatgggaa

SEQ ID NO: 2138187 - DNA, 15 bp, Homo sapiens
cagagacatgggaaa

SEQ ID NO: 2138188 - DNA, 15 bp, Homo sapiens
agagacatgggaaaa

SEQ ID NO: 2138189 - DNA, 15 bp, Homo sapiens
gagacatgggaaaaa

SEQ ID NO: 2138190 - DNA, 15 bp, Homo sapiens
agacatgggaaaaaa

SEQ ID NO: 2138191 - DNA, 15 bp, Homo sapiens
gacatgggaaaaaaa

SEQ ID NO: 2138192 - DNA, 15 bp, Homo sapiens
acatgggaaaaaaat

SEQ ID NO: 2138193 - DNA, 15 bp, Homo sapiens
catgggaaaaaaatg

SEQ ID NO: 2138194 - DNA, 15 bp, Homo sapiens
atgggaaaaaaatgc

SEQ ID NO: 2138195 - DNA, 15 bp, Homo sapiens
tgggaaaaaaatgca

SEQ ID NO: 2138196 - DNA, 15 bp, Homo sapiens
gggaaaaaaatgcat

SEQ ID NO: 2138197 - DNA, 15 bp, Homo sapiens
ggaaaaaaatgcatg

SEQ ID NO: 2138198 - DNA, 15 bp, Homo sapiens
gaaaaaaatgcatgc

SEQ ID NO: 2138199 - DNA, 15 bp, Homo sapiens
aaaaaaatgcatgcc

SEQ ID NO: 2138200 - DNA, 15 bp, Homo sapiens
aaaaaatgcatgcct

SEQ ID NO: 2138201 - DNA, 15 bp, Homo sapiens
aaaaatgcatgcctt

SEQ ID NO: 2138202 - DNA, 15 bp, Homo sapiens
aaaatgcatgccttc

SEQ ID NO: 2138203 - DNA, 15 bp, Homo sapiens
aaatgcatgccttcc

SEQ ID NO: 2138204 - DNA, 15 bp, Homo sapiens
aatgcatgccttccc

SEQ ID NO: 2138205 - DNA, 15 bp, Homo sapiens
atgcatgccttccca

SEQ ID NO: 2138206 - DNA, 15 bp, Homo sapiens
tgcatgccttcccag

SEQ ID NO: 2138207 - DNA, 15 bp, Homo sapiens
gcatgccttcccaga

SEQ ID NO: 2138208 - DNA, 15 bp, Homo sapiens
catgccttcccagag

SEQ ID NO: 2138209 - DNA, 15 bp, Homo sapiens
atgccttcccagaga

SEQ ID NO: 2138210 - DNA, 15 bp, Homo sapiens
tgccttcccagagaa

SEQ ID NO: 2138211 - DNA, 15 bp, Homo sapiens
gccttcccagagaat

SEQ ID NO: 2138212 - DNA, 15 bp, Homo sapiens
ccttcccagagaatg

SEQ ID NO: 2138213 - DNA, 15 bp, Homo sapiens
cttcccagagaatgc

SEQ ID NO: 2138214 - DNA, 15 bp, Homo sapiens
ttcccagagaatgcc

SEQ ID NO: 2138215 - DNA, 15 bp, Homo sapiens
tcccagagaatgcct

SEQ ID NO: 2138216 - DNA, 15 bp, Homo sapiens
cccagagaatgccta

SEQ ID NO: 2138217 - DNA, 15 bp, Homo sapiens
ccagagaatgcctaa

SEQ ID NO: 2138218 - DNA, 15 bp, Homo sapiens
cagagaatgcctaat

SEQ ID NO: 2138219 - DNA, 15 bp, Homo sapiens
agagaatgcctaata

SEQ ID NO: 2138220 - DNA, 15 bp, Homo sapiens
gagaatgcctaatac

SEQ ID NO: 2138221 - DNA, 15 bp, Homo sapiens
aagcaggtagctggg

SEQ ID NO: 2138222 - DNA, 15 bp, Homo sapiens
agcaggtagctgggt

SEQ ID NO: 2138223 - DNA, 15 bp, Homo sapiens
gcaggtagctgggtt

SEQ ID NO: 2138224 - DNA, 15 bp, Homo sapiens
caggtagctgggttt

SEQ ID NO: 2138225 - DNA, 15 bp, Homo sapiens
aggtagctgggtttt

SEQ ID NO: 2138226 - DNA, 15 bp, Homo sapiens
ggtagctgggttttg

SEQ ID NO: 2138227 - DNA, 15 bp, Homo sapiens
gtagctgggttttgt

SEQ ID NO: 2138228 - DNA, 15 bp, Homo sapiens
tagctgggttttgta

SEQ ID NO: 2138229 - DNA, 15 bp, Homo sapiens
agctgggttttgtag

SEQ ID NO: 2138230 - DNA, 15 bp, Homo sapiens
gctgggttttgtagt

SEQ ID NO: 2138231 - DNA, 15 bp, Homo sapiens
ctgggttttgtagtg

SEQ ID NO: 2138232 - DNA, 15 bp, Homo sapiens
tgggttttgtagtga

SEQ ID NO: 2138233 - DNA, 15 bp, Homo sapiens
gggttttgtagtgag

SEQ ID NO: 2138234 - DNA, 15 bp, Homo sapiens
ggttttgtagtgagc

SEQ ID NO: 2138235 - DNA, 15 bp, Homo sapiens
gttttgtagtgagct

SEQ ID NO: 2138236 - DNA, 15 bp, Homo sapiens
ttttgtagtgagctt

SEQ ID NO: 2138237 - DNA, 15 bp, Homo sapiens
tttgtagtgagcttg

SEQ ID NO: 2138238 - DNA, 15 bp, Homo sapiens
ttgtagtgagcttgc

SEQ ID NO: 2138239 - DNA, 15 bp, Homo sapiens
tgtagtgagcttgct

SEQ ID NO: 2138240 - DNA, 15 bp, Homo sapiens
gtagtgagcttgctc

SEQ ID NO: 2138241 - DNA, 15 bp, Homo sapiens
tagtgagcttgctcc

SEQ ID NO: 2138242 - DNA, 15 bp, Homo sapiens
agtgagcttgctcct

SEQ ID NO: 2138243 - DNA, 15 bp, Homo sapiens
gtgagcttgctcctt

SEQ ID NO: 2138244 - DNA, 15 bp, Homo sapiens
tgagcttgctcctta

SEQ ID NO: 2138245 - DNA, 15 bp, Homo sapiens
gagcttgctccttaa

SEQ ID NO: 2138246 - DNA, 15 bp, Homo sapiens
agcttgctccttaag

SEQ ID NO: 2138247 - DNA, 15 bp, Homo sapiens
gcttgctccttaagt

SEQ ID NO: 2138248 - DNA, 15 bp, Homo sapiens
cttgctccttaagtt

SEQ ID NO: 2138249 - DNA, 15 bp, Homo sapiens
ttgctccttaagtta

SEQ ID NO: 2138250 - DNA, 15 bp, Homo sapiens
tgctccttaagttac

SEQ ID NO: 2138251 - DNA, 15 bp, Homo sapiens
gctccttaagttaca

SEQ ID NO: 2138252 - DNA, 15 bp, Homo sapiens
ctccttaagttacag

SEQ ID NO: 2138253 - DNA, 15 bp, Homo sapiens
tccttaagttacagg

SEQ ID NO: 2138254 - DNA, 15 bp, Homo sapiens
ccttaagttacagga

SEQ ID NO: 2138255 - DNA, 15 bp, Homo sapiens
cttaagttacaggaa

SEQ ID NO: 2138256 - DNA, 15 bp, Homo sapiens
ttaagttacaggaac

SEQ ID NO: 2138257 - DNA, 15 bp, Homo sapiens
taagttacaggaact

SEQ ID NO: 2138258 - DNA, 15 bp, Homo sapiens
aagttacaggaactc

SEQ ID NO: 2138259 - DNA, 15 bp, Homo sapiens
agttacaggaactct

SEQ ID NO: 2138260 - DNA, 15 bp, Homo sapiens
gttacaggaactctc

SEQ ID NO: 2138261 - DNA, 15 bp, Homo sapiens
ttacaggaactctcc

SEQ ID NO: 2138262 - DNA, 15 bp, Homo sapiens
tacaggaactctcct

SEQ ID NO: 2138263 - DNA, 15 bp, Homo sapiens
acaggaactctcctt

SEQ ID NO: 2138264 - DNA, 15 bp, Homo sapiens
caggaactctcctta

SEQ ID NO: 2138265 - DNA, 15 bp, Homo sapiens
aggaactctccttat

SEQ ID NO: 2138266 - DNA, 15 bp, Homo sapiens
ggaactctccttata

SEQ ID NO: 2138267 - DNA, 15 bp, Homo sapiens
gaactctccttataa

SEQ ID NO: 2138268 - DNA, 15 bp, Homo sapiens
aactctccttataat

SEQ ID NO: 2138269 - DNA, 15 bp, Homo sapiens
actctccttataata

SEQ ID NO: 2138270 - DNA, 15 bp, Homo sapiens
ctctccttataatag

SEQ ID NO: 2138271 - DNA, 15 bp, Homo sapiens
tctccttataataga

SEQ ID NO: 2138272 - DNA, 15 bp, Homo sapiens
ctccttataatagac

SEQ ID NO: 2138273 - DNA, 15 bp, Homo sapiens
tccttataatagaca

SEQ ID NO: 2138274 - DNA, 15 bp, Homo sapiens
ccttataatagacac

SEQ ID NO: 2138275 - DNA, 15 bp, Homo sapiens
cttataatagacact

SEQ ID NO: 2138276 - DNA, 15 bp, Homo sapiens
ttataatagacactt

SEQ ID NO: 2138277 - DNA, 15 bp, Homo sapiens
tataatagacacttc

SEQ ID NO: 2138278 - DNA, 15 bp, Homo sapiens
ataatagacacttca

SEQ ID NO: 2138279 - DNA, 15 bp, Homo sapiens
taatagacacttcat

SEQ ID NO: 2138280 - DNA, 15 bp, Homo sapiens
aatagacacttcatt

SEQ ID NO: 2138281 - DNA, 15 bp, Homo sapiens
atagacacttcattt

SEQ ID NO: 2138282 - DNA, 15 bp, Homo sapiens
tagacacttcatttt

SEQ ID NO: 2138283 - DNA, 15 bp, Homo sapiens
agacacttcattttc

SEQ ID NO: 2138284 - DNA, 15 bp, Homo sapiens
gacacttcattttcc

SEQ ID NO: 2138285 - DNA, 15 bp, Homo sapiens
acacttcattttcct

SEQ ID NO: 2138286 - DNA, 15 bp, Homo sapiens
cacttcattttccta

SEQ ID NO: 2138287 - DNA, 15 bp, Homo sapiens
acttcattttcctag

SEQ ID NO: 2138288 - DNA, 15 bp, Homo sapiens
cttcattttcctagt

SEQ ID NO: 2138289 - DNA, 15 bp, Homo sapiens
ttcattttcctagtc

SEQ ID NO: 2138290 - DNA, 15 bp, Homo sapiens
tcattttcctagtcc

SEQ ID NO: 2138291 - DNA, 15 bp, Homo sapiens
cattttcctagtcca

SEQ ID NO: 2138292 - DNA, 15 bp, Homo sapiens
attttcctagtccat

SEQ ID NO: 2138293 - DNA, 15 bp, Homo sapiens
ttttcctagtccatc

SEQ ID NO: 2138294 - DNA, 15 bp, Homo sapiens
tttcctagtccatcc

SEQ ID NO: 2138295 - DNA, 15 bp, Homo sapiens
ttcctagtccatccc

SEQ ID NO: 2138296 - DNA, 15 bp, Homo sapiens
tcctagtccatccct

SEQ ID NO: 2138297 - DNA, 15 bp, Homo sapiens
cctagtccatccctc

SEQ ID NO: 2138298 - DNA, 15 bp, Homo sapiens
ctagtccatccctca

SEQ ID NO: 2138299 - DNA, 15 bp, Homo sapiens
tagtccatccctcat

SEQ ID NO: 2138300 - DNA, 15 bp, Homo sapiens
agtccatccctcatg

SEQ ID NO: 2138301 - DNA, 15 bp, Homo sapiens
gtccatccctcatga

SEQ ID NO: 2138302 - DNA, 15 bp, Homo sapiens
tccatccctcatgaa

SEQ ID NO: 2138303 - DNA, 15 bp, Homo sapiens
ccatccctcatgaaa

SEQ ID NO: 2138304 - DNA, 15 bp, Homo sapiens
catccctcatgaaaa

SEQ ID NO: 2138305 - DNA, 15 bp, Homo sapiens
atccctcatgaaaaa

SEQ ID NO: 2138306 - DNA, 15 bp, Homo sapiens
tccctcatgaaaaat

SEQ ID NO: 2138307 - DNA, 15 bp, Homo sapiens
ccctcatgaaaaatg

SEQ ID NO: 2138308 - DNA, 15 bp, Homo sapiens
cctcatgaaaaatga

SEQ ID NO: 2138309 - DNA, 15 bp, Homo sapiens
ctcatgaaaaatgac

SEQ ID NO: 2138310 - DNA, 15 bp, Homo sapiens
tcatgaaaaatgact

SEQ ID NO: 2138311 - DNA, 15 bp, Homo sapiens
catgaaaaatgactg

SEQ ID NO: 2138312 - DNA, 15 bp, Homo sapiens
atgaaaaatgactga

SEQ ID NO: 2138313 - DNA, 15 bp, Homo sapiens
tgaaaaatgactgac

SEQ ID NO: 2138314 - DNA, 15 bp, Homo sapiens
gaaaaatgactgacc

SEQ ID NO: 2138315 - DNA, 15 bp, Homo sapiens
aaaaatgactgacca

SEQ ID NO: 2138316 - DNA, 15 bp, Homo sapiens
aaaatgactgaccac

SEQ ID NO: 2138317 - DNA, 15 bp, Homo sapiens
aaatgactgaccact

SEQ ID NO: 2138318 - DNA, 15 bp, Homo sapiens
aatgactgaccactg

SEQ ID NO: 2138319 - DNA, 15 bp, Homo sapiens
atgactgaccactgc

SEQ ID NO: 2138320 - DNA, 15 bp, Homo sapiens
tgactgaccactgct

SEQ ID NO: 2138321 - DNA, 15 bp, Homo sapiens
gactgaccactgctg

SEQ ID NO: 2138322 - DNA, 15 bp, Homo sapiens
actgaccactgctgg

SEQ ID NO: 2138323 - DNA, 15 bp, Homo sapiens
ctgaccactgctggg

SEQ ID NO: 2138324 - DNA, 15 bp, Homo sapiens
tgaccactgctgggc

SEQ ID NO: 2138325 - DNA, 15 bp, Homo sapiens
gaccactgctgggca

SEQ ID NO: 2138326 - DNA, 15 bp, Homo sapiens
accactgctgggcag

SEQ ID NO: 2138327 - DNA, 15 bp, Homo sapiens
ccactgctgggcagc

SEQ ID NO: 2138328 - DNA, 15 bp, Homo sapiens
cactgctgggcagca

SEQ ID NO: 2138329 - DNA, 15 bp, Homo sapiens
actgctgggcagcag

SEQ ID NO: 2138330 - DNA, 15 bp, Homo sapiens
ctgctgggcagcagg

SEQ ID NO: 2138331 - DNA, 15 bp, Homo sapiens
tgctgggcagcagga

SEQ ID NO: 2138332 - DNA, 15 bp, Homo sapiens
gctgggcagcaggag

SEQ ID NO: 2138333 - DNA, 15 bp, Homo sapiens
ctgggcagcaggagg

SEQ ID NO: 2138334 - DNA, 15 bp, Homo sapiens
tgggcagcaggaggg

SEQ ID NO: 2138335 - DNA, 15 bp, Homo sapiens
gggcagcaggaggga

SEQ ID NO: 2138336 - DNA, 15 bp, Homo sapiens
ggcagcaggagggat

SEQ ID NO: 2138337 - DNA, 15 bp, Homo sapiens
gcagcaggagggatg

SEQ ID NO: 2138338 - DNA, 15 bp, Homo sapiens
cagcaggagggatga

SEQ ID NO: 2138339 - DNA, 15 bp, Homo sapiens
agcaggagggatgat

SEQ ID NO: 2138340 - DNA, 15 bp, Homo sapiens
gcaggagggatgatg

SEQ ID NO: 2138341 - DNA, 15 bp, Homo sapiens
caggagggatgatga

SEQ ID NO: 2138342 - DNA, 15 bp, Homo sapiens
aggagggatgatgac

SEQ ID NO: 2138343 - DNA, 15 bp, Homo sapiens
ggagggatgatgacc

SEQ ID NO: 2138344 - DNA, 15 bp, Homo sapiens
gagggatgatgacca

SEQ ID NO: 2138345 - DNA, 15 bp, Homo sapiens
agggatgatgaccaa

SEQ ID NO: 2138346 - DNA, 15 bp, Homo sapiens
gggatgatgaccaac

SEQ ID NO: 2138347 - DNA, 15 bp, Homo sapiens
ggatgatgaccaact

SEQ ID NO: 2138348 - DNA, 15 bp, Homo sapiens
gatgatgaccaacta

SEQ ID NO: 2138349 - DNA, 15 bp, Homo sapiens
atgatgaccaactaa

SEQ ID NO: 2138350 - DNA, 15 bp, Homo sapiens
tgatgaccaactaat

SEQ ID NO: 2138351 - DNA, 15 bp, Homo sapiens
gatgaccaactaatt

SEQ ID NO: 2138352 - DNA, 15 bp, Homo sapiens
tctaattatacctta

SEQ ID NO: 2138353 - DNA, 15 bp, Homo sapiens
ctaattataccttag

SEQ ID NO: 2138354 - DNA, 15 bp, Homo sapiens
taattataccttaga

SEQ ID NO: 2138355 - DNA, 15 bp, Homo sapiens
aattataccttagaa

SEQ ID NO: 2138356 - DNA, 15 bp, Homo sapiens
attataccttagaaa

SEQ ID NO: 2138357 - DNA, 15 bp, Homo sapiens
ttataccttagaaat

SEQ ID NO: 2138358 - DNA, 15 bp, Homo sapiens
tataccttagaaatg

SEQ ID NO: 2138359 - DNA, 15 bp, Homo sapiens
ataccttagaaatgt

SEQ ID NO: 2138360 - DNA, 15 bp, Homo sapiens
taccttagaaatgtt

SEQ ID NO: 2138361 - DNA, 15 bp, Homo sapiens
accttagaaatgttc

SEQ ID NO: 2138362 - DNA, 15 bp, Homo sapiens
ccttagaaatgttct

SEQ ID NO: 2138363 - DNA, 15 bp, Homo sapiens
cttagaaatgttctc

SEQ ID NO: 2138364 - DNA, 15 bp, Homo sapiens
ttagaaatgttctcc

SEQ ID NO: 2138365 - DNA, 15 bp, Homo sapiens
tagaaatgttctcct

SEQ ID NO: 2138366 - DNA, 15 bp, Homo sapiens
agaaatgttctcctt

SEQ ID NO: 2138367 - DNA, 15 bp, Homo sapiens
gaaatgttctccttt

SEQ ID NO: 2138368 - DNA, 15 bp, Homo sapiens
aaatgttctcctttt

SEQ ID NO: 2138369 - DNA, 15 bp, Homo sapiens
aatgttctccttttt

SEQ ID NO: 2138370 - DNA, 15 bp, Homo sapiens
atgttctccttttta

SEQ ID NO: 2138371 - DNA, 15 bp, Homo sapiens
tgttctcctttttat

SEQ ID NO: 2138372 - DNA, 15 bp, Homo sapiens
gttctcctttttatc

SEQ ID NO: 2138373 - DNA, 15 bp, Homo sapiens
ttctcctttttatca

SEQ ID NO: 2138374 - DNA, 15 bp, Homo sapiens
tctcctttttatcat

SEQ ID NO: 2138375 - DNA, 15 bp, Homo sapiens
ctcctttttatcatc

SEQ ID NO: 2138376 - DNA, 15 bp, Homo sapiens
tcctttttatcatca

SEQ ID NO: 2138377 - DNA, 15 bp, Homo sapiens
cctttttatcatcaa

SEQ ID NO: 2138378 - DNA, 15 bp, Homo sapiens
ctttttatcatcaaa

SEQ ID NO: 2138379 - DNA, 15 bp, Homo sapiens
tttttatcatcaaat

SEQ ID NO: 2138380 - DNA, 15 bp, Homo sapiens
ttttatcatcaaatc

SEQ ID NO: 2138381 - DNA, 15 bp, Homo sapiens
tttatcatcaaatct

SEQ ID NO: 2138382 - DNA, 15 bp, Homo sapiens
ttatcatcaaatctg

SEQ ID NO: 2138383 - DNA, 15 bp, Homo sapiens
tatcatcaaatctgc

SEQ ID NO: 2138384 - DNA, 15 bp, Homo sapiens
atcatcaaatctgct

SEQ ID NO: 2138385 - DNA, 15 bp, Homo sapiens
tcatcaaatctgctc

SEQ ID NO: 2138386 - DNA, 15 bp, Homo sapiens
catcaaatctgctca

SEQ ID NO: 2138387 - DNA, 15 bp, Homo sapiens
atcaaatctgctcaa

SEQ ID NO: 2138388 - DNA, 15 bp, Homo sapiens
tcaaatctgctcaag

SEQ ID NO: 2138389 - DNA, 15 bp, Homo sapiens
caaatctgctcaaga

SEQ ID NO: 2138390 - DNA, 15 bp, Homo sapiens
aaatctgctcaagaa

SEQ ID NO: 2138391 - DNA, 15 bp, Homo sapiens
aatctgctcaagaag

SEQ ID NO: 2138392 - DNA, 15 bp, Homo sapiens
atctgctcaagaagg

SEQ ID NO: 2138393 - DNA, 15 bp, Homo sapiens
tctgctcaagaaggg

SEQ ID NO: 2138394 - DNA, 15 bp, Homo sapiens
ctgctcaagaagggc

SEQ ID NO: 2138395 - DNA, 15 bp, Homo sapiens
tgctcaagaagggct

SEQ ID NO: 2138396 - DNA, 15 bp, Homo sapiens
gctcaagaagggctt

SEQ ID NO: 2138397 - DNA, 15 bp, Homo sapiens
ctcaagaagggcttt

SEQ ID NO: 2138398 - DNA, 15 bp, Homo sapiens
tcaagaagggctttt

SEQ ID NO: 2138399 - DNA, 15 bp, Homo sapiens
caagaagggcttttt

SEQ ID NO: 2138400 - DNA, 15 bp, Homo sapiens
aagaagggcttttta

SEQ ID NO: 2138401 - DNA, 15 bp, Homo sapiens
agaagggctttttat

SEQ ID NO: 2138402 - DNA, 15 bp, Homo sapiens
gaagggctttttata

SEQ ID NO: 2138403 - DNA, 15 bp, Homo sapiens
aagggctttttatag

SEQ ID NO: 2138404 - DNA, 15 bp, Homo sapiens
agggctttttatagt

SEQ ID NO: 2138405 - DNA, 15 bp, Homo sapiens
gggctttttatagta

SEQ ID NO: 2138406 - DNA, 15 bp, Homo sapiens
ggctttttatagtag

SEQ ID NO: 2138407 - DNA, 15 bp, Homo sapiens
gctttttatagtaga

SEQ ID NO: 2138408 - DNA, 15 bp, Homo sapiens
ctttttatagtagaa

SEQ ID NO: 2138409 - DNA, 15 bp, Homo sapiens
ttttatagtagaata

SEQ ID NO: 2138410 - DNA, 15 bp, Homo sapiens
tttatagtagaataa

SEQ ID NO: 2138411 - DNA, 15 bp, Homo sapiens
ttatagtagaataat

SEQ ID NO: 2138412 - DNA, 15 bp, Homo sapiens
tatagtagaataata

SEQ ID NO: 2138413 - DNA, 15 bp, Homo sapiens
atagtagaataatat

SEQ ID NO: 2138414 - DNA, 15 bp, Homo sapiens
tagtagaataatatc

SEQ ID NO: 2138415 - DNA, 15 bp, Homo sapiens
agtagaataatatca

SEQ ID NO: 2138416 - DNA, 15 bp, Homo sapiens
gtagaataatatcag

SEQ ID NO: 2138417 - DNA, 15 bp, Homo sapiens
tagaataatatcagt

SEQ ID NO: 2138418 - DNA, 15 bp, Homo sapiens
agaataatatcagtg

SEQ ID NO: 2138419 - DNA, 15 bp, Homo sapiens
gaataatatcagtgg

SEQ ID NO: 2138420 - DNA, 15 bp, Homo sapiens
aataatatcagtgga

SEQ ID NO: 2138421 - DNA, 15 bp, Homo sapiens
ataatatcagtggat

SEQ ID NO: 2138422 - DNA, 15 bp, Homo sapiens
taatatcagtggatg

SEQ ID NO: 2138423 - DNA, 15 bp, Homo sapiens
aatatcagtggatga

SEQ ID NO: 2138424 - DNA, 15 bp, Homo sapiens
atatcagtggatgaa

SEQ ID NO: 2138425 - DNA, 15 bp, Homo sapiens
tatcagtggatgaaa

SEQ ID NO: 2138426 - DNA, 15 bp, Homo sapiens
atcagtggatgaaaa

SEQ ID NO: 2138427 - DNA, 15 bp, Homo sapiens
tcagtggatgaaaac

SEQ ID NO: 2138428 - DNA, 15 bp, Homo sapiens
cagtggatgaaaaca

SEQ ID NO: 2138429 - DNA, 15 bp, Homo sapiens
agtggatgaaaacag

SEQ ID NO: 2138430 - DNA, 15 bp, Homo sapiens
gtggatgaaaacagc

SEQ ID NO: 2138431 - DNA, 15 bp, Homo sapiens
tggatgaaaacagct

SEQ ID NO: 2138432 - DNA, 15 bp, Homo sapiens
ggatgaaaacagctt

SEQ ID NO: 2138433 - DNA, 15 bp, Homo sapiens
gatgaaaacagctta

SEQ ID NO: 2138434 - DNA, 15 bp, Homo sapiens
atgaaaacagcttaa

SEQ ID NO: 2138435 - DNA, 15 bp, Homo sapiens
tgaaaacagcttaac

SEQ ID NO: 2138436 - DNA, 15 bp, Homo sapiens
gaaaacagcttaaca

SEQ ID NO: 2138437 - DNA, 15 bp, Homo sapiens
aaaacagcttaacat

SEQ ID NO: 2138438 - DNA, 15 bp, Homo sapiens
aaacagcttaacatt

SEQ ID NO: 2138439 - DNA, 15 bp, Homo sapiens
aacagcttaacattt

SEQ ID NO: 2138440 - DNA, 15 bp, Homo sapiens
acagcttaacatttt

SEQ ID NO: 2138441 - DNA, 15 bp, Homo sapiens
cagcttaacatttta

SEQ ID NO: 2138442 - DNA, 15 bp, Homo sapiens
agcttaacattttac

SEQ ID NO: 2138443 - DNA, 15 bp, Homo sapiens
gcttaacattttacc

SEQ ID NO: 2138444 - DNA, 15 bp, Homo sapiens
cttaacattttacca

SEQ ID NO: 2138445 - DNA, 15 bp, Homo sapiens
ttaacattttaccat

SEQ ID NO: 2138446 - DNA, 15 bp, Homo sapiens
taacattttaccatg

SEQ ID NO: 2138447 - DNA, 15 bp, Homo sapiens
aacattttaccatgc

SEQ ID NO: 2138448 - DNA, 15 bp, Homo sapiens
acattttaccatgct

SEQ ID NO: 2138449 - DNA, 15 bp, Homo sapiens
cattttaccatgctt

SEQ ID NO: 2138450 - DNA, 15 bp, Homo sapiens
attttaccatgctta

SEQ ID NO: 2138451 - DNA, 15 bp, Homo sapiens
ttttaccatgcttaa

SEQ ID NO: 2138452 - DNA, 15 bp, Homo sapiens
tttaccatgcttaag

SEQ ID NO: 2138453 - DNA, 15 bp, Homo sapiens
ttaccatgcttaagt

SEQ ID NO: 2138454 - DNA, 15 bp, Homo sapiens
taccatgcttaagtt

SEQ ID NO: 2138455 - DNA, 15 bp, Homo sapiens
accatgcttaagttt

SEQ ID NO: 2138456 - DNA, 15 bp, Homo sapiens
ccatgcttaagtttt

SEQ ID NO: 2138457 - DNA, 15 bp, Homo sapiens
catgcttaagtttta

SEQ ID NO: 2138458 - DNA, 15 bp, Homo sapiens
atgcttaagttttaa

SEQ ID NO: 2138459 - DNA, 15 bp, Homo sapiens
tgcttaagttttaag

SEQ ID NO: 2138460 - DNA, 15 bp, Homo sapiens
gcttaagttttaaga

SEQ ID NO: 2138461 - DNA, 15 bp, Homo sapiens
cttaagttttaagaa

SEQ ID NO: 2138462 - DNA, 15 bp, Homo sapiens
ttaagttttaagaat

SEQ ID NO: 2138463 - DNA, 15 bp, Homo sapiens
taagttttaagaata

SEQ ID NO: 2138464 - DNA, 15 bp, Homo sapiens
aagttttaagaataa

SEQ ID NO: 2138465 - DNA, 15 bp, Homo sapiens
agttttaagaataaa

SEQ ID NO: 2138466 - DNA, 15 bp, Homo sapiens
gttttaagaataaaa

SEQ ID NO: 2138467 - DNA, 15 bp, Homo sapiens
ttttaagaataaaat

SEQ ID NO: 2138468 - DNA, 15 bp, Homo sapiens
tttaagaataaaata

SEQ ID NO: 2138469 - DNA, 15 bp, Homo sapiens
ttaagaataaaataa

SEQ ID NO: 2138470 - DNA, 15 bp, Homo sapiens
taagaataaaataaa

SEQ ID NO: 2138471 - DNA, 15 bp, Homo sapiens
aagaataaaataaaa

SEQ ID NO: 2138472 - DNA, 15 bp, Homo sapiens
agaataaaataaaaa

SEQ ID NO: 2138473 - DNA, 15 bp, Homo sapiens
gaataaaataaaaat

SEQ ID NO: 2138474 - DNA, 15 bp, Homo sapiens
ataaaataaaaattg

SEQ ID NO: 2138475 - DNA, 15 bp, Homo sapiens
taaaataaaaattgg

SEQ ID NO: 2138476 - DNA, 15 bp, Homo sapiens
aaaataaaaattgga

SEQ ID NO: 2138477 - DNA, 15 bp, Homo sapiens
aaataaaaattggaa

SEQ ID NO: 2138478 - DNA, 15 bp, Homo sapiens
aataaaaattggaaa

SEQ ID NO: 2138479 - DNA, 15 bp, Homo sapiens
ataaaaattggaaat

SEQ ID NO: 2138480 - DNA, 15 bp, Homo sapiens
taaaaattggaaata

SEQ ID NO: 2138481 - DNA, 15 bp, Homo sapiens
aaaaattggaaataa

SEQ ID NO: 2138482 - DNA, 15 bp, Homo sapiens
aaaattggaaataat

SEQ ID NO: 2138483 - DNA, 15 bp, Homo sapiens
aaattggaaataatt

SEQ ID NO: 2138484 - DNA, 15 bp, Homo sapiens
aattggaaataattg

SEQ ID NO: 2138485 - DNA, 15 bp, Homo sapiens
attggaaataattgg

SEQ ID NO: 2138486 - DNA, 15 bp, Homo sapiens
ttggaaataattggc

SEQ ID NO: 2138487 - DNA, 15 bp, Homo sapiens
tggaaataattggcc

SEQ ID NO: 2138488 - DNA, 15 bp, Homo sapiens
ggaaataattggcca

SEQ ID NO: 2138489 - DNA, 15 bp, Homo sapiens
gaaataattggccaa

SEQ ID NO: 2138490 - DNA, 15 bp, Homo sapiens
aaataattggccaaa

SEQ ID NO: 2138491 - DNA, 15 bp, Homo sapiens
aataattggccaaaa

SEQ ID NO: 2138492 - DNA, 15 bp, Homo sapiens
ataattggccaaaat

SEQ ID NO: 2138493 - DNA, 15 bp, Homo sapiens
taattggccaaaatt

SEQ ID NO: 2138494 - DNA, 15 bp, Homo sapiens
aattggccaaaattg

SEQ ID NO: 2138495 - DNA, 15 bp, Homo sapiens
attggccaaaattga

SEQ ID NO: 2138496 - DNA, 15 bp, Homo sapiens
ttggccaaaattgaa

SEQ ID NO: 2138497 - DNA, 15 bp, Homo sapiens
tggccaaaattgaaa

SEQ ID NO: 2138498 - DNA, 15 bp, Homo sapiens
ggccaaaattgaaag

SEQ ID NO: 2138499 - DNA, 15 bp, Homo sapiens
gccaaaattgaaagg

SEQ ID NO: 2138500 - DNA, 15 bp, Homo sapiens
ccaaaattgaaagga

SEQ ID NO: 2138501 - DNA, 15 bp, Homo sapiens
caaaattgaaaggaa

SEQ ID NO: 2138502 - DNA, 15 bp, Homo sapiens
aaaattgaaaggaaa

SEQ ID NO: 2138503 - DNA, 15 bp, Homo sapiens
aaattgaaaggaaaa

SEQ ID NO: 2138504 - DNA, 15 bp, Homo sapiens
aattgaaaggaaaaa

SEQ ID NO: 2138505 - DNA, 15 bp, Homo sapiens
attgaaaggaaaaat

SEQ ID NO: 2138506 - DNA, 15 bp, Homo sapiens
ttgaaaggaaaaatt

SEQ ID NO: 2138507 - DNA, 15 bp, Homo sapiens
tgaaaggaaaaattt

SEQ ID NO: 2138508 - DNA, 15 bp, Homo sapiens
gaaaggaaaaatttt

SEQ ID NO: 2138509 - DNA, 15 bp, Homo sapiens
aaaggaaaaattttt

SEQ ID NO: 2138510 - DNA, 15 bp, Homo sapiens
aaggaaaaatttttt

SEQ ID NO: 2138511 - DNA, 15 bp, Homo sapiens
aggaaaaattttttt

SEQ ID NO: 2138512 - DNA, 15 bp, Homo sapiens
ggaaaaattttttta

SEQ ID NO: 2138513 - DNA, 15 bp, Homo sapiens
gaaaaatttttttaa

SEQ ID NO: 2138514 - DNA, 15 bp, Homo sapiens
aaatttttttaaaat

SEQ ID NO: 2138515 - DNA, 15 bp, Homo sapiens
aatttttttaaaatt

SEQ ID NO: 2138516 - DNA, 15 bp, Homo sapiens
atttttttaaaattt

SEQ ID NO: 2138517 - DNA, 15 bp, Homo sapiens
tttttttaaaatttc

SEQ ID NO: 2138518 - DNA, 15 bp, Homo sapiens
ttttttaaaatttct

SEQ ID NO: 2138519 - DNA, 15 bp, Homo sapiens
tttttaaaatttctc

SEQ ID NO: 2138520 - DNA, 15 bp, Homo sapiens
ttttaaaatttctct

SEQ ID NO: 2138521 - DNA, 15 bp, Homo sapiens
tttaaaatttctcta

SEQ ID NO: 2138522 - DNA, 15 bp, Homo sapiens
ttaaaatttctctaa

SEQ ID NO: 2138523 - DNA, 15 bp, Homo sapiens
taaaatttctctaaa

SEQ ID NO: 2138524 - DNA, 15 bp, Homo sapiens
aaaatttctctaaat

SEQ ID NO: 2138525 - DNA, 15 bp, Homo sapiens
aaatttctctaaatg

SEQ ID NO: 2138526 - DNA, 15 bp, Homo sapiens
aatttctctaaatgt

SEQ ID NO: 2138527 - DNA, 15 bp, Homo sapiens
atttctctaaatgta

SEQ ID NO: 2138528 - DNA, 15 bp, Homo sapiens
tttctctaaatgtag

SEQ ID NO: 2138529 - DNA, 15 bp, Homo sapiens
ttctctaaatgtagg

SEQ ID NO: 2138530 - DNA, 15 bp, Homo sapiens
tctctaaatgtaggc

SEQ ID NO: 2138531 - DNA, 15 bp, Homo sapiens
ctctaaatgtaggcc

SEQ ID NO: 2138532 - DNA, 15 bp, Homo sapiens
tctaaatgtaggcct

SEQ ID NO: 2138533 - DNA, 15 bp, Homo sapiens
ctaaatgtaggcctg

SEQ ID NO: 2138534 - DNA, 15 bp, Homo sapiens
taaatgtaggcctgg

SEQ ID NO: 2138535 - DNA, 15 bp, Homo sapiens
aaatgtaggcctggc

SEQ ID NO: 2138536 - DNA, 15 bp, Homo sapiens
aatgtaggcctggct

SEQ ID NO: 2138537 - DNA, 15 bp, Homo sapiens
atgtaggcctggctg

SEQ ID NO: 2138538 - DNA, 15 bp, Homo sapiens
tgtaggcctggctgg

SEQ ID NO: 2138539 - DNA, 15 bp, Homo sapiens
gtaggcctggctggg

SEQ ID NO: 2138540 - DNA, 15 bp, Homo sapiens
taggcctggctgggc

SEQ ID NO: 2138541 - DNA, 15 bp, Homo sapiens
aggcctggctgggct

SEQ ID NO: 2138542 - DNA, 15 bp, Homo sapiens
ggcctggctgggctt

SEQ ID NO: 2138543 - DNA, 15 bp, Homo sapiens
gcctggctgggcttt

SEQ ID NO: 2138544 - DNA, 15 bp, Homo sapiens
cctggctgggctttg

SEQ ID NO: 2138545 - DNA, 15 bp, Homo sapiens
ctggctgggctttga

SEQ ID NO: 2138546 - DNA, 15 bp, Homo sapiens
tggctgggctttgac

SEQ ID NO: 2138547 - DNA, 15 bp, Homo sapiens
ggctgggctttgacc

SEQ ID NO: 2138548 - DNA, 15 bp, Homo sapiens
gctgggctttgacct

SEQ ID NO: 2138549 - DNA, 15 bp, Homo sapiens
ctgggctttgacctt

SEQ ID NO: 2138550 - DNA, 15 bp, Homo sapiens
tgggctttgaccttt

SEQ ID NO: 2138551 - DNA, 15 bp, Homo sapiens
gggctttgacctttt

SEQ ID NO: 2138552 - DNA, 15 bp, Homo sapiens
ggctttgaccttttc

SEQ ID NO: 2138553 - DNA, 15 bp, Homo sapiens
gctttgaccttttcc

SEQ ID NO: 2138554 - DNA, 15 bp, Homo sapiens
ctttgaccttttccg

SEQ ID NO: 2138555 - DNA, 15 bp, Homo sapiens
tttgaccttttccgt

SEQ ID NO: 2138556 - DNA, 15 bp, Homo sapiens
ttgaccttttccgtt

SEQ ID NO: 2138557 - DNA, 15 bp, Homo sapiens
tgaccttttccgttt

SEQ ID NO: 2138558 - DNA, 15 bp, Homo sapiens
gaccttttccgtttt

SEQ ID NO: 2138559 - DNA, 15 bp, Homo sapiens
accttttccgttttt

SEQ ID NO: 2138560 - DNA, 15 bp, Homo sapiens
ccttttccgttttta

SEQ ID NO: 2138561 - DNA, 15 bp, Homo sapiens
cttttccgtttttaa

SEQ ID NO: 2138562 - DNA, 15 bp, Homo sapiens
ttttccgtttttaaa

SEQ ID NO: 2138563 - DNA, 15 bp, Homo sapiens
tttccgtttttaaat

SEQ ID NO: 2138564 - DNA, 15 bp, Homo sapiens
ttccgtttttaaatc

SEQ ID NO: 2138565 - DNA, 15 bp, Homo sapiens
tccgtttttaaatca

SEQ ID NO: 2138566 - DNA, 15 bp, Homo sapiens
ccgtttttaaatcac

SEQ ID NO: 2138567 - DNA, 15 bp, Homo sapiens
cgtttttaaatcact

SEQ ID NO: 2138568 - DNA, 15 bp, Homo sapiens
gtttttaaatcactc

SEQ ID NO: 2138569 - DNA, 15 bp, Homo sapiens
tttttaaatcactca

SEQ ID NO: 2138570 - DNA, 15 bp, Homo sapiens
ttttaaatcactcac

SEQ ID NO: 2138571 - DNA, 15 bp, Homo sapiens
tttaaatcactcaca

SEQ ID NO: 2138572 - DNA, 15 bp, Homo sapiens
ttaaatcactcacag

SEQ ID NO: 2138573 - DNA, 15 bp, Homo sapiens
taaatcactcacaga

SEQ ID NO: 2138574 - DNA, 15 bp, Homo sapiens
aaatcactcacagag

SEQ ID NO: 2138575 - DNA, 15 bp, Homo sapiens
aatcactcacagagg

SEQ ID NO: 2138576 - DNA, 15 bp, Homo sapiens
atcactcacagaggg

SEQ ID NO: 2138577 - DNA, 15 bp, Homo sapiens
tcactcacagagggt

SEQ ID NO: 2138578 - DNA, 15 bp, Homo sapiens
cactcacagagggtg

SEQ ID NO: 2138579 - DNA, 15 bp, Homo sapiens
actcacagagggtgg

SEQ ID NO: 2138580 - DNA, 15 bp, Homo sapiens
ctcacagagggtggg

SEQ ID NO: 2138581 - DNA, 15 bp, Homo sapiens
tcacagagggtggga

SEQ ID NO: 2138582 - DNA, 15 bp, Homo sapiens
cacagagggtgggac

SEQ ID NO: 2138583 - DNA, 15 bp, Homo sapiens
acagagggtgggaca

SEQ ID NO: 2138584 - DNA, 15 bp, Homo sapiens
cagagggtgggacag

SEQ ID NO: 2138585 - DNA, 15 bp, Homo sapiens
agagggtgggacagg

SEQ ID NO: 2138586 - DNA, 15 bp, Homo sapiens
gagggtgggacagga

SEQ ID NO: 2138587 - DNA, 15 bp, Homo sapiens
agggtgggacaggag

SEQ ID NO: 2138588 - DNA, 15 bp, Homo sapiens
gggtgggacaggagg

SEQ ID NO: 2138589 - DNA, 15 bp, Homo sapiens
ggtgggacaggagga

SEQ ID NO: 2138590 - DNA, 15 bp, Homo sapiens
gtgggacaggaggaa

SEQ ID NO: 2138591 - DNA, 15 bp, Homo sapiens
tgggacaggaggaag

SEQ ID NO: 2138592 - DNA, 15 bp, Homo sapiens
gggacaggaggaaga

SEQ ID NO: 2138593 - DNA, 15 bp, Homo sapiens
ggacaggaggaagag

SEQ ID NO: 2138594 - DNA, 15 bp, Homo sapiens
gacaggaggaagagt

SEQ ID NO: 2138595 - DNA, 15 bp, Homo sapiens
acaggaggaagagtg

SEQ ID NO: 2138596 - DNA, 15 bp, Homo sapiens
caggaggaagagtga

SEQ ID NO: 2138597 - DNA, 15 bp, Homo sapiens
aggaggaagagtgaa

SEQ ID NO: 2138598 - DNA, 15 bp, Homo sapiens
ggaggaagagtgaag

SEQ ID NO: 2138599 - DNA, 15 bp, Homo sapiens
gaggaagagtgaagg

SEQ ID NO: 2138600 - DNA, 15 bp, Homo sapiens
aggaagagtgaagga

SEQ ID NO: 2138601 - DNA, 15 bp, Homo sapiens
ggaagagtgaaggaa

SEQ ID NO: 2138602 - DNA, 15 bp, Homo sapiens
gaagagtgaaggaaa

SEQ ID NO: 2138603 - DNA, 15 bp, Homo sapiens
aagagtgaaggaaaa

SEQ ID NO: 2138604 - DNA, 15 bp, Homo sapiens
agagtgaaggaaaag

SEQ ID NO: 2138605 - DNA, 15 bp, Homo sapiens
gagtgaaggaaaagg

SEQ ID NO: 2138606 - DNA, 15 bp, Homo sapiens
agtgaaggaaaaggt

SEQ ID NO: 2138607 - DNA, 15 bp, Homo sapiens
gtgaaggaaaaggtc

SEQ ID NO: 2138608 - DNA, 15 bp, Homo sapiens
tgaaggaaaaggtca

SEQ ID NO: 2138609 - DNA, 15 bp, Homo sapiens
gaaggaaaaggtcaa

SEQ ID NO: 2138610 - DNA, 15 bp, Homo sapiens
aaggaaaaggtcaaa

SEQ ID NO: 2138611 - DNA, 15 bp, Homo sapiens
aggaaaaggtcaaac

SEQ ID NO: 2138612 - DNA, 15 bp, Homo sapiens
ggaaaaggtcaaacc

SEQ ID NO: 2138613 - DNA, 15 bp, Homo sapiens
gaaaaggtcaaacct

SEQ ID NO: 2138614 - DNA, 15 bp, Homo sapiens
aaaaggtcaaacctg

SEQ ID NO: 2138615 - DNA, 15 bp, Homo sapiens
aaaggtcaaacctgt

SEQ ID NO: 2138616 - DNA, 15 bp, Homo sapiens
aaggtcaaacctgtt

SEQ ID NO: 2138617 - DNA, 15 bp, Homo sapiens
aggtcaaacctgttt

SEQ ID NO: 2138618 - DNA, 15 bp, Homo sapiens
ggtcaaacctgtttt

SEQ ID NO: 2138619 - DNA, 15 bp, Homo sapiens
gtcaaacctgtttta

SEQ ID NO: 2138620 - DNA, 15 bp, Homo sapiens
tcaaacctgttttaa

SEQ ID NO: 2138621 - DNA, 15 bp, Homo sapiens
caaacctgttttaag

SEQ ID NO: 2138622 - DNA, 15 bp, Homo sapiens
aaacctgttttaagg

SEQ ID NO: 2138623 - DNA, 15 bp, Homo sapiens
aacctgttttaaggg

SEQ ID NO: 2138624 - DNA, 15 bp, Homo sapiens
acctgttttaagggc

SEQ ID NO: 2138625 - DNA, 15 bp, Homo sapiens
cctgttttaagggca

SEQ ID NO: 2138626 - DNA, 15 bp, Homo sapiens
ataagattatcttaa

SEQ ID NO: 2138627 - DNA, 15 bp, Homo sapiens
taagattatcttaaa

SEQ ID NO: 2138628 - DNA, 15 bp, Homo sapiens
aagattatcttaaag

SEQ ID NO: 2138629 - DNA, 15 bp, Homo sapiens
agattatcttaaagc

SEQ ID NO: 2138630 - DNA, 15 bp, Homo sapiens
gattatcttaaagct

SEQ ID NO: 2138631 - DNA, 15 bp, Homo sapiens
attatcttaaagctg

SEQ ID NO: 2138632 - DNA, 15 bp, Homo sapiens
ttatcttaaagctga

SEQ ID NO: 2138633 - DNA, 15 bp, Homo sapiens
tatcttaaagctgaa

SEQ ID NO: 2138634 - DNA, 15 bp, Homo sapiens
atcttaaagctgaag

SEQ ID NO: 2138635 - DNA, 15 bp, Homo sapiens
tcttaaagctgaagc

SEQ ID NO: 2138636 - DNA, 15 bp, Homo sapiens
cttaaagctgaagcc

SEQ ID NO: 2138637 - DNA, 15 bp, Homo sapiens
ttaaagctgaagcca

SEQ ID NO: 2138638 - DNA, 15 bp, Homo sapiens
taaagctgaagccaa

SEQ ID NO: 2138639 - DNA, 15 bp, Homo sapiens
aaagctgaagccaaa

SEQ ID NO: 2138640 - DNA, 15 bp, Homo sapiens
aagctgaagccaaaa

SEQ ID NO: 2138641 - DNA, 15 bp, Homo sapiens
agctgaagccaaaat

SEQ ID NO: 2138642 - DNA, 15 bp, Homo sapiens
gctgaagccaaaata

SEQ ID NO: 2138643 - DNA, 15 bp, Homo sapiens
ctgaagccaaaatat

SEQ ID NO: 2138644 - DNA, 15 bp, Homo sapiens
tgaagccaaaatatg

SEQ ID NO: 2138645 - DNA, 15 bp, Homo sapiens
gaagccaaaatatgc

SEQ ID NO: 2138646 - DNA, 15 bp, Homo sapiens
aagccaaaatatgct

SEQ ID NO: 2138647 - DNA, 15 bp, Homo sapiens
agccaaaatatgctt

SEQ ID NO: 2138648 - DNA, 15 bp, Homo sapiens
gccaaaatatgcttc

SEQ ID NO: 2138649 - DNA, 15 bp, Homo sapiens
ccaaaatatgcttca

SEQ ID NO: 2138650 - DNA, 15 bp, Homo sapiens
caaaatatgcttcaa

SEQ ID NO: 2138651 - DNA, 15 bp, Homo sapiens
aaaatatgcttcaaa

SEQ ID NO: 2138652 - DNA, 15 bp, Homo sapiens
aaatatgcttcaaaa

SEQ ID NO: 2138653 - DNA, 15 bp, Homo sapiens
aatatgcttcaaaag

SEQ ID NO: 2138654 - DNA, 15 bp, Homo sapiens
atatgcttcaaaaga

SEQ ID NO: 2138655 - DNA, 15 bp, Homo sapiens
tatgcttcaaaagaa

SEQ ID NO: 2138656 - DNA, 15 bp, Homo sapiens
atgcttcaaaagaag

SEQ ID NO: 2138657 - DNA, 15 bp, Homo sapiens
tgcttcaaaagaaga

SEQ ID NO: 2138658 - DNA, 15 bp, Homo sapiens
gcttcaaaagaagag

SEQ ID NO: 2138659 - DNA, 15 bp, Homo sapiens
cttcaaaagaagagg

SEQ ID NO: 2138660 - DNA, 15 bp, Homo sapiens
ttcaaaagaagagga

SEQ ID NO: 2138661 - DNA, 15 bp, Homo sapiens
tcaaaagaagaggac

SEQ ID NO: 2138662 - DNA, 15 bp, Homo sapiens
caaaagaagaggact

SEQ ID NO: 2138663 - DNA, 15 bp, Homo sapiens
aaaagaagaggactt

SEQ ID NO: 2138664 - DNA, 15 bp, Homo sapiens
aaagaagaggacttt

SEQ ID NO: 2138665 - DNA, 15 bp, Homo sapiens
aagaagaggacttta

SEQ ID NO: 2138666 - DNA, 15 bp, Homo sapiens
agaagaggactttat

SEQ ID NO: 2138667 - DNA, 15 bp, Homo sapiens
gaagaggactttatt

SEQ ID NO: 2138668 - DNA, 15 bp, Homo sapiens
aagaggactttattg

SEQ ID NO: 2138669 - DNA, 15 bp, Homo sapiens
agaggactttattgt

SEQ ID NO: 2138670 - DNA, 15 bp, Homo sapiens
gaggactttattgtt

SEQ ID NO: 2138671 - DNA, 15 bp, Homo sapiens
aggactttattgttc

SEQ ID NO: 2138672 - DNA, 15 bp, Homo sapiens
ggactttattgttca

SEQ ID NO: 2138673 - DNA, 15 bp, Homo sapiens
gactttattgttcat

SEQ ID NO: 2138674 - DNA, 15 bp, Homo sapiens
actttattgttcatt

SEQ ID NO: 2138675 - DNA, 15 bp, Homo sapiens
ctttattgttcattg

SEQ ID NO: 2138676 - DNA, 15 bp, Homo sapiens
tttattgttcattgt

SEQ ID NO: 2138677 - DNA, 15 bp, Homo sapiens
ttattgttcattgta

SEQ ID NO: 2138678 - DNA, 15 bp, Homo sapiens
tattgttcattgtag

SEQ ID NO: 2138679 - DNA, 15 bp, Homo sapiens
attgttcattgtagt

SEQ ID NO: 2138680 - DNA, 15 bp, Homo sapiens
ttgttcattgtagtt

SEQ ID NO: 2138681 - DNA, 15 bp, Homo sapiens
tgttcattgtagttc

SEQ ID NO: 2138682 - DNA, 15 bp, Homo sapiens
gttcattgtagttca

SEQ ID NO: 2138683 - DNA, 15 bp, Homo sapiens
ttcattgtagttcat

SEQ ID NO: 2138684 - DNA, 15 bp, Homo sapiens
tcattgtagttcata

SEQ ID NO: 2138685 - DNA, 15 bp, Homo sapiens
cattgtagttcatac

SEQ ID NO: 2138686 - DNA, 15 bp, Homo sapiens
attgtagttcataca

SEQ ID NO: 2138687 - DNA, 15 bp, Homo sapiens
ttgtagttcatacat

SEQ ID NO: 2138688 - DNA, 15 bp, Homo sapiens
tgtagttcatacatt

SEQ ID NO: 2138689 - DNA, 15 bp, Homo sapiens
gtagttcatacattc

SEQ ID NO: 2138690 - DNA, 15 bp, Homo sapiens
tagttcatacattca

SEQ ID NO: 2138691 - DNA, 15 bp, Homo sapiens
agttcatacattcaa

SEQ ID NO: 2138692 - DNA, 15 bp, Homo sapiens
gttcatacattcaaa

SEQ ID NO: 2138693 - DNA, 15 bp, Homo sapiens
ttcatacattcaaag

SEQ ID NO: 2138694 - DNA, 15 bp, Homo sapiens
tcatacattcaaagc

SEQ ID NO: 2138695 - DNA, 15 bp, Homo sapiens
catacattcaaagca

SEQ ID NO: 2138696 - DNA, 15 bp, Homo sapiens
atacattcaaagcat

SEQ ID NO: 2138697 - DNA, 15 bp, Homo sapiens
tacattcaaagcatc

SEQ ID NO: 2138698 - DNA, 15 bp, Homo sapiens
acattcaaagcatct

SEQ ID NO: 2138699 - DNA, 15 bp, Homo sapiens
cattcaaagcatctg

SEQ ID NO: 2138700 - DNA, 15 bp, Homo sapiens
attcaaagcatctga

SEQ ID NO: 2138701 - DNA, 15 bp, Homo sapiens
ttcaaagcatctgaa

SEQ ID NO: 2138702 - DNA, 15 bp, Homo sapiens
tcaaagcatctgaac

SEQ ID NO: 2138703 - DNA, 15 bp, Homo sapiens
caaagcatctgaact

SEQ ID NO: 2138704 - DNA, 15 bp, Homo sapiens
aaagcatctgaactg

SEQ ID NO: 2138705 - DNA, 15 bp, Homo sapiens
aagcatctgaactgt

SEQ ID NO: 2138706 - DNA, 15 bp, Homo sapiens
agcatctgaactgta

SEQ ID NO: 2138707 - DNA, 15 bp, Homo sapiens
gcatctgaactgtag

SEQ ID NO: 2138708 - DNA, 15 bp, Homo sapiens
catctgaactgtagt

SEQ ID NO: 2138709 - DNA, 15 bp, Homo sapiens
atctgaactgtagtt

SEQ ID NO: 2138710 - DNA, 15 bp, Homo sapiens
tctgaactgtagttt

SEQ ID NO: 2138711 - DNA, 15 bp, Homo sapiens
ctgaactgtagtttc

SEQ ID NO: 2138712 - DNA, 15 bp, Homo sapiens
tgaactgtagtttct

SEQ ID NO: 2138713 - DNA, 15 bp, Homo sapiens
gaactgtagtttcta

SEQ ID NO: 2138714 - DNA, 15 bp, Homo sapiens
aactgtagtttctat

SEQ ID NO: 2138715 - DNA, 15 bp, Homo sapiens
actgtagtttctata

SEQ ID NO: 2138716 - DNA, 15 bp, Homo sapiens
ctgtagtttctatag

SEQ ID NO: 2138717 - DNA, 15 bp, Homo sapiens
tgtagtttctatagc

SEQ ID NO: 2138718 - DNA, 15 bp, Homo sapiens
gtagtttctatagca

SEQ ID NO: 2138719 - DNA, 15 bp, Homo sapiens
tagtttctatagcaa

SEQ ID NO: 2138720 - DNA, 15 bp, Homo sapiens
agtttctatagcaag

SEQ ID NO: 2138721 - DNA, 15 bp, Homo sapiens
gtttctatagcaagc

SEQ ID NO: 2138722 - DNA, 15 bp, Homo sapiens
tttctatagcaagcc

SEQ ID NO: 2138723 - DNA, 15 bp, Homo sapiens
ttctatagcaagcca

SEQ ID NO: 2138724 - DNA, 15 bp, Homo sapiens
tctatagcaagccaa

SEQ ID NO: 2138725 - DNA, 15 bp, Homo sapiens
ctatagcaagccaat

SEQ ID NO: 2138726 - DNA, 15 bp, Homo sapiens
tatagcaagccaatt

SEQ ID NO: 2138727 - DNA, 15 bp, Homo sapiens
atagcaagccaatta

SEQ ID NO: 2138728 - DNA, 15 bp, Homo sapiens
tagcaagccaattac

SEQ ID NO: 2138729 - DNA, 15 bp, Homo sapiens
agcaagccaattaca

SEQ ID NO: 2138730 - DNA, 15 bp, Homo sapiens
gcaagccaattacat

SEQ ID NO: 2138731 - DNA, 15 bp, Homo sapiens
caagccaattacatc

SEQ ID NO: 2138732 - DNA, 15 bp, Homo sapiens
aagccaattacatcc

SEQ ID NO: 2138733 - DNA, 15 bp, Homo sapiens
agccaattacatcca

SEQ ID NO: 2138734 - DNA, 15 bp, Homo sapiens
gccaattacatccat

SEQ ID NO: 2138735 - DNA, 15 bp, Homo sapiens
ccaattacatccata

SEQ ID NO: 2138736 - DNA, 15 bp, Homo sapiens
caattacatccataa

SEQ ID NO: 2138737 - DNA, 15 bp, Homo sapiens
aattacatccataag

SEQ ID NO: 2138738 - DNA, 15 bp, Homo sapiens
attacatccataagt

SEQ ID NO: 2138739 - DNA, 15 bp, Homo sapiens
ttacatccataagtg

SEQ ID NO: 2138740 - DNA, 15 bp, Homo sapiens
tacatccataagtgg

SEQ ID NO: 2138741 - DNA, 15 bp, Homo sapiens
acatccataagtgga

SEQ ID NO: 2138742 - DNA, 15 bp, Homo sapiens
catccataagtggag

SEQ ID NO: 2138743 - DNA, 15 bp, Homo sapiens
atccataagtggaga

SEQ ID NO: 2138744 - DNA, 15 bp, Homo sapiens
tccataagtggagaa

SEQ ID NO: 2138745 - DNA, 15 bp, Homo sapiens
ccataagtggagaag

SEQ ID NO: 2138746 - DNA, 15 bp, Homo sapiens
cataagtggagaagg

SEQ ID NO: 2138747 - DNA, 15 bp, Homo sapiens
ataagtggagaagga

SEQ ID NO: 2138748 - DNA, 15 bp, Homo sapiens
taagtggagaaggaa

SEQ ID NO: 2138749 - DNA, 15 bp, Homo sapiens
aagtggagaaggaaa

SEQ ID NO: 2138750 - DNA, 15 bp, Homo sapiens
agtggagaaggaaat

SEQ ID NO: 2138751 - DNA, 15 bp, Homo sapiens
gtggagaaggaaata

SEQ ID NO: 2138752 - DNA, 15 bp, Homo sapiens
tggagaaggaaatag

SEQ ID NO: 2138753 - DNA, 15 bp, Homo sapiens
ggagaaggaaataga

SEQ ID NO: 2138754 - DNA, 15 bp, Homo sapiens
gagaaggaaatagat

SEQ ID NO: 2138755 - DNA, 15 bp, Homo sapiens
agaaggaaatagata

SEQ ID NO: 2138756 - DNA, 15 bp, Homo sapiens
gaaggaaatagataa

SEQ ID NO: 2138757 - DNA, 15 bp, Homo sapiens
aaggaaatagataaa

SEQ ID NO: 2138758 - DNA, 15 bp, Homo sapiens
aggaaatagataaat

SEQ ID NO: 2138759 - DNA, 15 bp, Homo sapiens
ggaaatagataaatg

SEQ ID NO: 2138760 - DNA, 15 bp, Homo sapiens
gaaatagataaatgt

SEQ ID NO: 2138761 - DNA, 15 bp, Homo sapiens
aaatagataaatgtc

SEQ ID NO: 2138762 - DNA, 15 bp, Homo sapiens
aatagataaatgtca

SEQ ID NO: 2138763 - DNA, 15 bp, Homo sapiens
atagataaatgtcaa

SEQ ID NO: 2138764 - DNA, 15 bp, Homo sapiens
tagataaatgtcaaa

SEQ ID NO: 2138765 - DNA, 15 bp, Homo sapiens
agataaatgtcaaag

SEQ ID NO: 2138766 - DNA, 15 bp, Homo sapiens
gataaatgtcaaagt

SEQ ID NO: 2138767 - DNA, 15 bp, Homo sapiens
ataaatgtcaaagta

SEQ ID NO: 2138768 - DNA, 15 bp, Homo sapiens
taaatgtcaaagtat

SEQ ID NO: 2138769 - DNA, 15 bp, Homo sapiens
aaatgtcaaagtatg

SEQ ID NO: 2138770 - DNA, 15 bp, Homo sapiens
aatgtcaaagtatga

SEQ ID NO: 2138771 - DNA, 15 bp, Homo sapiens
atgtcaaagtatgat

SEQ ID NO: 2138772 - DNA, 15 bp, Homo sapiens
tgtcaaagtatgatt

SEQ ID NO: 2138773 - DNA, 15 bp, Homo sapiens
gtcaaagtatgattg

SEQ ID NO: 2138774 - DNA, 15 bp, Homo sapiens
tcaaagtatgattgg

SEQ ID NO: 2138775 - DNA, 15 bp, Homo sapiens
caaagtatgattggt

SEQ ID NO: 2138776 - DNA, 15 bp, Homo sapiens
aaagtatgattggtg

SEQ ID NO: 2138777 - DNA, 15 bp, Homo sapiens
aagtatgattggtgg

SEQ ID NO: 2138778 - DNA, 15 bp, Homo sapiens
agtatgattggtgga

SEQ ID NO: 2138779 - DNA, 15 bp, Homo sapiens
gtatgattggtggag

SEQ ID NO: 2138780 - DNA, 15 bp, Homo sapiens
tatgattggtggagg

SEQ ID NO: 2138781 - DNA, 15 bp, Homo sapiens
atgattggtggaggg

SEQ ID NO: 2138782 - DNA, 15 bp, Homo sapiens
tgattggtggaggga

SEQ ID NO: 2138783 - DNA, 15 bp, Homo sapiens
gattggtggagggag

SEQ ID NO: 2138784 - DNA, 15 bp, Homo sapiens
attggtggagggagc

SEQ ID NO: 2138785 - DNA, 15 bp, Homo sapiens
ttggtggagggagca

SEQ ID NO: 2138786 - DNA, 15 bp, Homo sapiens
tggtggagggagcaa

SEQ ID NO: 2138787 - DNA, 15 bp, Homo sapiens
ggtggagggagcaag

SEQ ID NO: 2138788 - DNA, 15 bp, Homo sapiens
gtggagggagcaagg

SEQ ID NO: 2138789 - DNA, 15 bp, Homo sapiens
tggagggagcaaggt

SEQ ID NO: 2138790 - DNA, 15 bp, Homo sapiens
ggagggagcaaggtt

SEQ ID NO: 2138791 - DNA, 15 bp, Homo sapiens
gagggagcaaggttg

SEQ ID NO: 2138792 - DNA, 15 bp, Homo sapiens
agggagcaaggttga

SEQ ID NO: 2138793 - DNA, 15 bp, Homo sapiens
gggagcaaggttgaa

SEQ ID NO: 2138794 - DNA, 15 bp, Homo sapiens
ggagcaaggttgaag

SEQ ID NO: 2138795 - DNA, 15 bp, Homo sapiens
gagcaaggttgaaga

SEQ ID NO: 2138796 - DNA, 15 bp, Homo sapiens
agcaaggttgaagat

SEQ ID NO: 2138797 - DNA, 15 bp, Homo sapiens
gcaaggttgaagata

SEQ ID NO: 2138798 - DNA, 15 bp, Homo sapiens
caaggttgaagataa

SEQ ID NO: 2138799 - DNA, 15 bp, Homo sapiens
aaggttgaagataat

SEQ ID NO: 2138800 - DNA, 15 bp, Homo sapiens
aggttgaagataatc

SEQ ID NO: 2138801 - DNA, 15 bp, Homo sapiens
ggttgaagataatct

SEQ ID NO: 2138802 - DNA, 15 bp, Homo sapiens
gttgaagataatctg

SEQ ID NO: 2138803 - DNA, 15 bp, Homo sapiens
ttgaagataatctgg

SEQ ID NO: 2138804 - DNA, 15 bp, Homo sapiens
tgaagataatctggg

SEQ ID NO: 2138805 - DNA, 15 bp, Homo sapiens
gaagataatctgggg

SEQ ID NO: 2138806 - DNA, 15 bp, Homo sapiens
aagataatctggggt

SEQ ID NO: 2138807 - DNA, 15 bp, Homo sapiens
agataatctggggtt

SEQ ID NO: 2138808 - DNA, 15 bp, Homo sapiens
gataatctggggttg

SEQ ID NO: 2138809 - DNA, 15 bp, Homo sapiens
ataatctggggttga

SEQ ID NO: 2138810 - DNA, 15 bp, Homo sapiens
taatctggggttgaa

SEQ ID NO: 2138811 - DNA, 15 bp, Homo sapiens
aatctggggttgaaa

SEQ ID NO: 2138812 - DNA, 15 bp, Homo sapiens
atctggggttgaaat

SEQ ID NO: 2138813 - DNA, 15 bp, Homo sapiens
tctggggttgaaatt

SEQ ID NO: 2138814 - DNA, 15 bp, Homo sapiens
ctggggttgaaattt

SEQ ID NO: 2138815 - DNA, 15 bp, Homo sapiens
ggggttgaaattttc

SEQ ID NO: 2138816 - DNA, 15 bp, Homo sapiens
gggttgaaattttct

SEQ ID NO: 2138817 - DNA, 15 bp, Homo sapiens
ggttgaaattttcta

SEQ ID NO: 2138818 - DNA, 15 bp, Homo sapiens
gttgaaattttctag

SEQ ID NO: 2138819 - DNA, 15 bp, Homo sapiens
ttgaaattttctagt

SEQ ID NO: 2138820 - DNA, 15 bp, Homo sapiens
tgaaattttctagtt

SEQ ID NO: 2138821 - DNA, 15 bp, Homo sapiens
gaaattttctagttt

SEQ ID NO: 2138822 - DNA, 15 bp, Homo sapiens
aaattttctagtttt

SEQ ID NO: 2138823 - DNA, 15 bp, Homo sapiens
aattttctagttttc

SEQ ID NO: 2138824 - DNA, 15 bp, Homo sapiens
attttctagttttca

SEQ ID NO: 2138825 - DNA, 15 bp, Homo sapiens
ttttctagttttcat

SEQ ID NO: 2138826 - DNA, 15 bp, Homo sapiens
tttctagttttcatt

SEQ ID NO: 2138827 - DNA, 15 bp, Homo sapiens
ttctagttttcattc

SEQ ID NO: 2138828 - DNA, 15 bp, Homo sapiens
tctagttttcattct

SEQ ID NO: 2138829 - DNA, 15 bp, Homo sapiens
ctagttttcattctg

SEQ ID NO: 2138830 - DNA, 15 bp, Homo sapiens
tagttttcattctgt

SEQ ID NO: 2138831 - DNA, 15 bp, Homo sapiens
agttttcattctgta

SEQ ID NO: 2138832 - DNA, 15 bp, Homo sapiens
gttttcattctgtac

SEQ ID NO: 2138833 - DNA, 15 bp, Homo sapiens
ttttcattctgtaca

SEQ ID NO: 2138834 - DNA, 15 bp, Homo sapiens
tttcattctgtacat

SEQ ID NO: 2138835 - DNA, 15 bp, Homo sapiens
ttcattctgtacatt

SEQ ID NO: 2138836 - DNA, 15 bp, Homo sapiens
tcattctgtacattt

SEQ ID NO: 2138837 - DNA, 15 bp, Homo sapiens
cattctgtacatttt

SEQ ID NO: 2138838 - DNA, 15 bp, Homo sapiens
attctgtacattttt

SEQ ID NO: 2138839 - DNA, 15 bp, Homo sapiens
ttctgtacattttta

SEQ ID NO: 2138840 - DNA, 15 bp, Homo sapiens
tctgtacatttttag

SEQ ID NO: 2138841 - DNA, 15 bp, Homo sapiens
ctgtacatttttagt

SEQ ID NO: 2138842 - DNA, 15 bp, Homo sapiens
tgtacatttttagtt

SEQ ID NO: 2138843 - DNA, 15 bp, Homo sapiens
gtacatttttagtta

SEQ ID NO: 2138844 - DNA, 15 bp, Homo sapiens
tacatttttagttag

SEQ ID NO: 2138845 - DNA, 15 bp, Homo sapiens
acatttttagttaga

SEQ ID NO: 2138846 - DNA, 15 bp, Homo sapiens
cctgggttcaaatga

SEQ ID NO: 2138847 - DNA, 15 bp, Homo sapiens
ctgggttcaaatgat

SEQ ID NO: 2138848 - DNA, 15 bp, Homo sapiens
tgggttcaaatgatt

SEQ ID NO: 2138849 - DNA, 15 bp, Homo sapiens
gggttcaaatgattc

SEQ ID NO: 2138850 - DNA, 15 bp, Homo sapiens
ggttcaaatgattct

SEQ ID NO: 2138851 - DNA, 15 bp, Homo sapiens
gttcaaatgattctc

SEQ ID NO: 2138852 - DNA, 15 bp, Homo sapiens
ttcaaatgattctcc

SEQ ID NO: 2138853 - DNA, 15 bp, Homo sapiens
tcaaatgattctcct

SEQ ID NO: 2138854 - DNA, 15 bp, Homo sapiens
caaatgattctcctg

SEQ ID NO: 2138855 - DNA, 15 bp, Homo sapiens
tgattctcctgcctt

SEQ ID NO: 2138856 - DNA, 15 bp, Homo sapiens
gattctcctgccttg

SEQ ID NO: 2138857 - DNA, 15 bp, Homo sapiens
attctcctgccttgg

SEQ ID NO: 2138858 - DNA, 15 bp, Homo sapiens
tctcctgccttggcc

SEQ ID NO: 2138859 - DNA, 15 bp, Homo sapiens
ctcctgccttggccc

SEQ ID NO: 2138860 - DNA, 15 bp, Homo sapiens
tcctgccttggcccc

SEQ ID NO: 2138861 - DNA, 15 bp, Homo sapiens
cctgccttggccccc

SEQ ID NO: 2138862 - DNA, 15 bp, Homo sapiens
ctgccttggccccct

SEQ ID NO: 2138863 - DNA, 15 bp, Homo sapiens
tgccttggccccctg

SEQ ID NO: 2138864 - DNA, 15 bp, Homo sapiens
gccttggccccctga

SEQ ID NO: 2138865 - DNA, 15 bp, Homo sapiens
ccttggccccctgag

SEQ ID NO: 2138866 - DNA, 15 bp, Homo sapiens
cttggccccctgagt

SEQ ID NO: 2138867 - DNA, 15 bp, Homo sapiens
ttggccccctgagta

SEQ ID NO: 2138868 - DNA, 15 bp, Homo sapiens
tggccccctgagtag

SEQ ID NO: 2138869 - DNA, 15 bp, Homo sapiens
ggccccctgagtagc

SEQ ID NO: 2138870 - DNA, 15 bp, Homo sapiens
gccccctgagtagct

SEQ ID NO: 2138871 - DNA, 15 bp, Homo sapiens
ccccctgagtagctg

SEQ ID NO: 2138872 - DNA, 15 bp, Homo sapiens
cccctgagtagctgg

SEQ ID NO: 2138873 - DNA, 15 bp, Homo sapiens
ccctgagtagctggg

SEQ ID NO: 2138874 - DNA, 15 bp, Homo sapiens
ctgagtagctgggaa

SEQ ID NO: 2138875 - DNA, 15 bp, Homo sapiens
tgagtagctgggaat

SEQ ID NO: 2138876 - DNA, 15 bp, Homo sapiens
gagtagctgggaata

SEQ ID NO: 2138877 - DNA, 15 bp, Homo sapiens
agtagctgggaatac

SEQ ID NO: 2138878 - DNA, 15 bp, Homo sapiens
gtagctgggaataca

SEQ ID NO: 2138879 - DNA, 15 bp, Homo sapiens
tagctgggaatacag

SEQ ID NO: 2138880 - DNA, 15 bp, Homo sapiens
agctgggaatacagg

SEQ ID NO: 2138881 - DNA, 15 bp, Homo sapiens
gctgggaatacagga

SEQ ID NO: 2138882 - DNA, 15 bp, Homo sapiens
ctgggaatacaggag

SEQ ID NO: 2138883 - DNA, 15 bp, Homo sapiens
tgggaatacaggagc

SEQ ID NO: 2138884 - DNA, 15 bp, Homo sapiens
gggaatacaggagcc

SEQ ID NO: 2138885 - DNA, 15 bp, Homo sapiens
ggaatacaggagcct

SEQ ID NO: 2138886 - DNA, 15 bp, Homo sapiens
gaatacaggagcctg

SEQ ID NO: 2138887 - DNA, 15 bp, Homo sapiens
aatacaggagcctgc

SEQ ID NO: 2138888 - DNA, 15 bp, Homo sapiens
atacaggagcctgcc

SEQ ID NO: 2138889 - DNA, 15 bp, Homo sapiens
tacaggagcctgcca

SEQ ID NO: 2138890 - DNA, 15 bp, Homo sapiens
acaggagcctgccac

SEQ ID NO: 2138891 - DNA, 15 bp, Homo sapiens
caggagcctgccacc

SEQ ID NO: 2138892 - DNA, 15 bp, Homo sapiens
aggagcctgccacca

SEQ ID NO: 2138893 - DNA, 15 bp, Homo sapiens
ggagcctgccaccac

SEQ ID NO: 2138894 - DNA, 15 bp, Homo sapiens
gagcctgccaccaca

SEQ ID NO: 2138895 - DNA, 15 bp, Homo sapiens
agcctgccaccacac

SEQ ID NO: 2138896 - DNA, 15 bp, Homo sapiens
cagctaatttttttc

SEQ ID NO: 2138897 - DNA, 15 bp, Homo sapiens
agctaatttttttct

SEQ ID NO: 2138898 - DNA, 15 bp, Homo sapiens
gctaatttttttctt

SEQ ID NO: 2138899 - DNA, 15 bp, Homo sapiens
ctaatttttttcttg

SEQ ID NO: 2138900 - DNA, 15 bp, Homo sapiens
taatttttttcttgt

SEQ ID NO: 2138901 - DNA, 15 bp, Homo sapiens
aatttttttcttgta

SEQ ID NO: 2138902 - DNA, 15 bp, Homo sapiens
atttttttcttgtat

SEQ ID NO: 2138903 - DNA, 15 bp, Homo sapiens
tttttttcttgtatt

SEQ ID NO: 2138904 - DNA, 15 bp, Homo sapiens
ttttttcttgtattt

SEQ ID NO: 2138905 - DNA, 15 bp, Homo sapiens
tttttcttgtatttt

SEQ ID NO: 2138906 - DNA, 15 bp, Homo sapiens
ttttcttgtattttt

SEQ ID NO: 2138907 - DNA, 15 bp, Homo sapiens
tttcttgtattttta

SEQ ID NO: 2138908 - DNA, 15 bp, Homo sapiens
ttcttgtatttttag

SEQ ID NO: 2138909 - DNA, 15 bp, Homo sapiens
tcttgtatttttagt

SEQ ID NO: 2138910 - DNA, 15 bp, Homo sapiens
cttgtatttttagta

SEQ ID NO: 2138911 - DNA, 15 bp, Homo sapiens
ggccaggctggtcta

SEQ ID NO: 2138912 - DNA, 15 bp, Homo sapiens
gccaggctggtctag

SEQ ID NO: 2138913 - DNA, 15 bp, Homo sapiens
ccaggctggtctaga

SEQ ID NO: 2138914 - DNA, 15 bp, Homo sapiens
caggctggtctagaa

SEQ ID NO: 2138915 - DNA, 15 bp, Homo sapiens
aggctggtctagaat

SEQ ID NO: 2138916 - DNA, 15 bp, Homo sapiens
ggctggtctagaatt

SEQ ID NO: 2138917 - DNA, 15 bp, Homo sapiens
gctggtctagaattc

SEQ ID NO: 2138918 - DNA, 15 bp, Homo sapiens
ctggtctagaattcc

SEQ ID NO: 2138919 - DNA, 15 bp, Homo sapiens
tggtctagaattcct

SEQ ID NO: 2138920 - DNA, 15 bp, Homo sapiens
ggtctagaattcctg

SEQ ID NO: 2138921 - DNA, 15 bp, Homo sapiens
gtctagaattcctga

SEQ ID NO: 2138922 - DNA, 15 bp, Homo sapiens
tctagaattcctgac

SEQ ID NO: 2138923 - DNA, 15 bp, Homo sapiens
ctagaattcctgacc

SEQ ID NO: 2138924 - DNA, 15 bp, Homo sapiens
tagaattcctgacct

SEQ ID NO: 2138925 - DNA, 15 bp, Homo sapiens
agaattcctgacctc

SEQ ID NO: 2138926 - DNA, 15 bp, Homo sapiens
gaattcctgacctcg

SEQ ID NO: 2138927 - DNA, 15 bp, Homo sapiens
aattcctgacctcgg

SEQ ID NO: 2138928 - DNA, 15 bp, Homo sapiens
attcctgacctcggg

SEQ ID NO: 2138929 - DNA, 15 bp, Homo sapiens
ttcctgacctcgggt

SEQ ID NO: 2138930 - DNA, 15 bp, Homo sapiens
gacctcgggtgatcc

SEQ ID NO: 2138931 - DNA, 15 bp, Homo sapiens
acctcgggtgatcca

SEQ ID NO: 2138932 - DNA, 15 bp, Homo sapiens
cctcgggtgatccac

SEQ ID NO: 2138933 - DNA, 15 bp, Homo sapiens
ctcgggtgatccacc

SEQ ID NO: 2138934 - DNA, 15 bp, Homo sapiens
tcgggtgatccacct

SEQ ID NO: 2138935 - DNA, 15 bp, Homo sapiens
cgggtgatccacctg

SEQ ID NO: 2138936 - DNA, 15 bp, Homo sapiens
gggtgatccacctgc

SEQ ID NO: 2138937 - DNA, 15 bp, Homo sapiens
atccacctgcctcgt

SEQ ID NO: 2138938 - DNA, 15 bp, Homo sapiens
tccacctgcctcgtc

SEQ ID NO: 2138939 - DNA, 15 bp, Homo sapiens
ccacctgcctcgtcc

SEQ ID NO: 2138940 - DNA, 15 bp, Homo sapiens
cacctgcctcgtcct

SEQ ID NO: 2138941 - DNA, 15 bp, Homo sapiens
acctgcctcgtcctt

SEQ ID NO: 2138942 - DNA, 15 bp, Homo sapiens
cctgcctcgtccttc

SEQ ID NO: 2138943 - DNA, 15 bp, Homo sapiens
ctgcctcgtccttcc

SEQ ID NO: 2138944 - DNA, 15 bp, Homo sapiens
tgcctcgtccttcca

SEQ ID NO: 2138945 - DNA, 15 bp, Homo sapiens
gcctcgtccttccaa

SEQ ID NO: 2138946 - DNA, 15 bp, Homo sapiens
cctcgtccttccaaa

SEQ ID NO: 2138947 - DNA, 15 bp, Homo sapiens
ctcgtccttccaaag

SEQ ID NO: 2138948 - DNA, 15 bp, Homo sapiens
tcgtccttccaaagt

SEQ ID NO: 2138949 - DNA, 15 bp, Homo sapiens
cgtccttccaaagtg

SEQ ID NO: 2138950 - DNA, 15 bp, Homo sapiens
gtccttccaaagtgg

SEQ ID NO: 2138951 - DNA, 15 bp, Homo sapiens
tccttccaaagtggt

SEQ ID NO: 2138952 - DNA, 15 bp, Homo sapiens
tccaaagtggtggga

SEQ ID NO: 2138953 - DNA, 15 bp, Homo sapiens
ccaaagtggtgggat

SEQ ID NO: 2138954 - DNA, 15 bp, Homo sapiens
caaagtggtgggatt

SEQ ID NO: 2138955 - DNA, 15 bp, Homo sapiens
aaagtggtgggatta

SEQ ID NO: 2138956 - DNA, 15 bp, Homo sapiens
aagtggtgggattac

SEQ ID NO: 2138957 - DNA, 15 bp, Homo sapiens
agtggtgggattaca

SEQ ID NO: 2138958 - DNA, 15 bp, Homo sapiens
gtggtgggattacag

SEQ ID NO: 2138959 - DNA, 15 bp, Homo sapiens
tggtgggattacagg

SEQ ID NO: 2138960 - DNA, 15 bp, Homo sapiens
ggtgggattacaggt

SEQ ID NO: 2138961 - DNA, 15 bp, Homo sapiens
tacaggtgtgagccc

SEQ ID NO: 2138962 - DNA, 15 bp, Homo sapiens
acaggtgtgagcccc

SEQ ID NO: 2138963 - DNA, 15 bp, Homo sapiens
caggtgtgagccccc

SEQ ID NO: 2138964 - DNA, 15 bp, Homo sapiens
aggtgtgagcccccg

SEQ ID NO: 2138965 - DNA, 15 bp, Homo sapiens
ggtgtgagcccccgc

SEQ ID NO: 2138966 - DNA, 15 bp, Homo sapiens
gtgtgagcccccgcg

SEQ ID NO: 2138967 - DNA, 15 bp, Homo sapiens
tgtgagcccccgcgc

SEQ ID NO: 2138968 - DNA, 15 bp, Homo sapiens
gtgagcccccgcgcc

SEQ ID NO: 2138969 - DNA, 15 bp, Homo sapiens
tgagcccccgcgccc

SEQ ID NO: 2138970 - DNA, 15 bp, Homo sapiens
gagcccccgcgcccg

SEQ ID NO: 2138971 - DNA, 15 bp, Homo sapiens
agcccccgcgcccga

SEQ ID NO: 2138972 - DNA, 15 bp, Homo sapiens
gcccccgcgcccgac

SEQ ID NO: 2138973 - DNA, 15 bp, Homo sapiens
cccccgcgcccgacc

SEQ ID NO: 2138974 - DNA, 15 bp, Homo sapiens
ccccgcgcccgaccg

SEQ ID NO: 2138975 - DNA, 15 bp, Homo sapiens
cccgcgcccgaccga

SEQ ID NO: 2138976 - DNA, 15 bp, Homo sapiens
ccgcgcccgaccgac

SEQ ID NO: 2138977 - DNA, 15 bp, Homo sapiens
cgcgcccgaccgact

SEQ ID NO: 2138978 - DNA, 15 bp, Homo sapiens
gcgcccgaccgacta

SEQ ID NO: 2138979 - DNA, 15 bp, Homo sapiens
cgcccgaccgactat

SEQ ID NO: 2138980 - DNA, 15 bp, Homo sapiens
gcccgaccgactatt

SEQ ID NO: 2138981 - DNA, 15 bp, Homo sapiens
cccgaccgactatta

SEQ ID NO: 2138982 - DNA, 15 bp, Homo sapiens
ccgaccgactattac

SEQ ID NO: 2138983 - DNA, 15 bp, Homo sapiens
cgaccgactattact

SEQ ID NO: 2138984 - DNA, 15 bp, Homo sapiens
gaccgactattactt

SEQ ID NO: 2138985 - DNA, 15 bp, Homo sapiens
accgactattacttt

SEQ ID NO: 2138986 - DNA, 15 bp, Homo sapiens
ccgactattactttt

SEQ ID NO: 2138987 - DNA, 15 bp, Homo sapiens
cgactattacttttc

SEQ ID NO: 2138988 - DNA, 15 bp, Homo sapiens
actattacttttcta

SEQ ID NO: 2138989 - DNA, 15 bp, Homo sapiens
ctattacttttctac

SEQ ID NO: 2138990 - DNA, 15 bp, Homo sapiens
tattacttttctact

SEQ ID NO: 2138991 - DNA, 15 bp, Homo sapiens
attacttttctacta

SEQ ID NO: 2138992 - DNA, 15 bp, Homo sapiens
ttacttttctactat

SEQ ID NO: 2138993 - DNA, 15 bp, Homo sapiens
tacttttctactata

SEQ ID NO: 2138994 - DNA, 15 bp, Homo sapiens
acttttctactataa

SEQ ID NO: 2138995 - DNA, 15 bp, Homo sapiens
cttttctactataaa

SEQ ID NO: 2138996 - DNA, 15 bp, Homo sapiens
ttttctactataaat

SEQ ID NO: 2138997 - DNA, 15 bp, Homo sapiens
tttctactataaatc

SEQ ID NO: 2138998 - DNA, 15 bp, Homo sapiens
ttctactataaatca

SEQ ID NO: 2138999 - DNA, 15 bp, Homo sapiens
tctactataaatcaa

SEQ ID NO: 2139000 - DNA, 15 bp, Homo sapiens
ctactataaatcaag

SEQ ID NO: 2139001 - DNA, 15 bp, Homo sapiens
tactataaatcaaga

SEQ ID NO: 2139002 - DNA, 15 bp, Homo sapiens
actataaatcaagac

SEQ ID NO: 2139003 - DNA, 15 bp, Homo sapiens
ctataaatcaagaca

SEQ ID NO: 2139004 - DNA, 15 bp, Homo sapiens
tataaatcaagacaa

SEQ ID NO: 2139005 - DNA, 15 bp, Homo sapiens
ataaatcaagacaaa

SEQ ID NO: 2139006 - DNA, 15 bp, Homo sapiens
taaatcaagacaaaa

SEQ ID NO: 2139007 - DNA, 15 bp, Homo sapiens
aaatcaagacaaaaa

SEQ ID NO: 2139008 - DNA, 15 bp, Homo sapiens
aatcaagacaaaaag

SEQ ID NO: 2139009 - DNA, 15 bp, Homo sapiens
atcaagacaaaaagg

SEQ ID NO: 2139010 - DNA, 15 bp, Homo sapiens
tcaagacaaaaaggg

SEQ ID NO: 2139011 - DNA, 15 bp, Homo sapiens
caagacaaaaagggg

SEQ ID NO: 2139012 - DNA, 15 bp, Homo sapiens
aagacaaaaaggggc

SEQ ID NO: 2139013 - DNA, 15 bp, Homo sapiens
agacaaaaaggggct

SEQ ID NO: 2139014 - DNA, 15 bp, Homo sapiens
gacaaaaaggggctt

SEQ ID NO: 2139015 - DNA, 15 bp, Homo sapiens
acaaaaaggggcttg

SEQ ID NO: 2139016 - DNA, 15 bp, Homo sapiens
caaaaaggggcttgg

SEQ ID NO: 2139017 - DNA, 15 bp, Homo sapiens
aaaaaggggcttggg

SEQ ID NO: 2139018 - DNA, 15 bp, Homo sapiens
aaaaggggcttgggg

SEQ ID NO: 2139019 - DNA, 15 bp, Homo sapiens
aaaggggcttggggt

SEQ ID NO: 2139020 - DNA, 15 bp, Homo sapiens
aaggggcttggggta

SEQ ID NO: 2139021 - DNA, 15 bp, Homo sapiens
aggggcttggggtag

SEQ ID NO: 2139022 - DNA, 15 bp, Homo sapiens
ggggcttggggtagg

SEQ ID NO: 2139023 - DNA, 15 bp, Homo sapiens
gggcttggggtaggc

SEQ ID NO: 2139024 - DNA, 15 bp, Homo sapiens
ggcttggggtaggca

SEQ ID NO: 2139025 - DNA, 15 bp, Homo sapiens
gcttggggtaggcag

SEQ ID NO: 2139026 - DNA, 15 bp, Homo sapiens
cttggggtaggcagg

SEQ ID NO: 2139027 - DNA, 15 bp, Homo sapiens
ttggggtaggcaggg

SEQ ID NO: 2139028 - DNA, 15 bp, Homo sapiens
tggggtaggcagggg

SEQ ID NO: 2139029 - DNA, 15 bp, Homo sapiens
ggggtaggcaggggt

SEQ ID NO: 2139030 - DNA, 15 bp, Homo sapiens
gggtaggcaggggtt

SEQ ID NO: 2139031 - DNA, 15 bp, Homo sapiens
ggtaggcaggggttg

SEQ ID NO: 2139032 - DNA, 15 bp, Homo sapiens
gtaggcaggggttgg

SEQ ID NO: 2139033 - DNA, 15 bp, Homo sapiens
taggcaggggttgga

SEQ ID NO: 2139034 - DNA, 15 bp, Homo sapiens
aggcaggggttggag

SEQ ID NO: 2139035 - DNA, 15 bp, Homo sapiens
ggcaggggttggaga

SEQ ID NO: 2139036 - DNA, 15 bp, Homo sapiens
gcaggggttggagaa

SEQ ID NO: 2139037 - DNA, 15 bp, Homo sapiens
caggggttggagaac

SEQ ID NO: 2139038 - DNA, 15 bp, Homo sapiens
aggggttggagaact

SEQ ID NO: 2139039 - DNA, 15 bp, Homo sapiens
ggggttggagaactg

SEQ ID NO: 2139040 - DNA, 15 bp, Homo sapiens
gggttggagaactgg

SEQ ID NO: 2139041 - DNA, 15 bp, Homo sapiens
ggttggagaactggg

SEQ ID NO: 2139042 - DNA, 15 bp, Homo sapiens
gttggagaactgggg

SEQ ID NO: 2139043 - DNA, 15 bp, Homo sapiens
ttggagaactgggga

SEQ ID NO: 2139044 - DNA, 15 bp, Homo sapiens
tggagaactggggag

SEQ ID NO: 2139045 - DNA, 15 bp, Homo sapiens
ggagaactggggagc

SEQ ID NO: 2139046 - DNA, 15 bp, Homo sapiens
gagaactggggagca

SEQ ID NO: 2139047 - DNA, 15 bp, Homo sapiens
agaactggggagcag

SEQ ID NO: 2139048 - DNA, 15 bp, Homo sapiens
gaactggggagcaga

SEQ ID NO: 2139049 - DNA, 15 bp, Homo sapiens
aactggggagcagac

SEQ ID NO: 2139050 - DNA, 15 bp, Homo sapiens
actggggagcagaca

SEQ ID NO: 2139051 - DNA, 15 bp, Homo sapiens
ctggggagcagacag

SEQ ID NO: 2139052 - DNA, 15 bp, Homo sapiens
tggggagcagacagt

SEQ ID NO: 2139053 - DNA, 15 bp, Homo sapiens
ggggagcagacagtc

SEQ ID NO: 2139054 - DNA, 15 bp, Homo sapiens
gggagcagacagtct

SEQ ID NO: 2139055 - DNA, 15 bp, Homo sapiens
ggagcagacagtctc

SEQ ID NO: 2139056 - DNA, 15 bp, Homo sapiens
gagcagacagtctca

SEQ ID NO: 2139057 - DNA, 15 bp, Homo sapiens
agcagacagtctcag

SEQ ID NO: 2139058 - DNA, 15 bp, Homo sapiens
gcagacagtctcagt

SEQ ID NO: 2139059 - DNA, 15 bp, Homo sapiens
cagacagtctcagtt

SEQ ID NO: 2139060 - DNA, 15 bp, Homo sapiens
agacagtctcagtta

SEQ ID NO: 2139061 - DNA, 15 bp, Homo sapiens
gacagtctcagttaa

SEQ ID NO: 2139062 - DNA, 15 bp, Homo sapiens
acagtctcagttaaa

SEQ ID NO: 2139063 - DNA, 15 bp, Homo sapiens
cagtctcagttaaac

SEQ ID NO: 2139064 - DNA, 15 bp, Homo sapiens
agtctcagttaaacc

SEQ ID NO: 2139065 - DNA, 15 bp, Homo sapiens
gtctcagttaaacct

SEQ ID NO: 2139066 - DNA, 15 bp, Homo sapiens
tctcagttaaacctt

SEQ ID NO: 2139067 - DNA, 15 bp, Homo sapiens
ctcagttaaaccttt

SEQ ID NO: 2139068 - DNA, 15 bp, Homo sapiens
tcagttaaaccttta

SEQ ID NO: 2139069 - DNA, 15 bp, Homo sapiens
cagttaaacctttac

SEQ ID NO: 2139070 - DNA, 15 bp, Homo sapiens
agttaaacctttact

SEQ ID NO: 2139071 - DNA, 15 bp, Homo sapiens
gttaaacctttactt

SEQ ID NO: 2139072 - DNA, 15 bp, Homo sapiens
ttaaacctttacttg

SEQ ID NO: 2139073 - DNA, 15 bp, Homo sapiens
taaacctttacttgt

SEQ ID NO: 2139074 - DNA, 15 bp, Homo sapiens
aaacctttacttgta

SEQ ID NO: 2139075 - DNA, 15 bp, Homo sapiens
aacctttacttgtat

SEQ ID NO: 2139076 - DNA, 15 bp, Homo sapiens
acctttacttgtatt

SEQ ID NO: 2139077 - DNA, 15 bp, Homo sapiens
cctttacttgtattt

SEQ ID NO: 2139078 - DNA, 15 bp, Homo sapiens
ctttacttgtatttg

SEQ ID NO: 2139079 - DNA, 15 bp, Homo sapiens
tttacttgtatttgc

SEQ ID NO: 2139080 - DNA, 15 bp, Homo sapiens
ttacttgtatttgct

SEQ ID NO: 2139081 - DNA, 15 bp, Homo sapiens
tacttgtatttgctc

SEQ ID NO: 2139082 - DNA, 15 bp, Homo sapiens
acttgtatttgctca

SEQ ID NO: 2139083 - DNA, 15 bp, Homo sapiens
cttgtatttgctcat

SEQ ID NO: 2139084 - DNA, 15 bp, Homo sapiens
ttgtatttgctcatg

SEQ ID NO: 2139085 - DNA, 15 bp, Homo sapiens
tgtatttgctcatgg

SEQ ID NO: 2139086 - DNA, 15 bp, Homo sapiens
gtatttgctcatggc

SEQ ID NO: 2139087 - DNA, 15 bp, Homo sapiens
tatttgctcatggct

SEQ ID NO: 2139088 - DNA, 15 bp, Homo sapiens
atttgctcatggctg

SEQ ID NO: 2139089 - DNA, 15 bp, Homo sapiens
tttgctcatggctgg

SEQ ID NO: 2139090 - DNA, 15 bp, Homo sapiens
ttgctcatggctgga

SEQ ID NO: 2139091 - DNA, 15 bp, Homo sapiens
tgctcatggctggag

SEQ ID NO: 2139092 - DNA, 15 bp, Homo sapiens
gctcatggctggagt

SEQ ID NO: 2139093 - DNA, 15 bp, Homo sapiens
ctcatggctggagtc

SEQ ID NO: 2139094 - DNA, 15 bp, Homo sapiens
tcatggctggagtcc

SEQ ID NO: 2139095 - DNA, 15 bp, Homo sapiens
catggctggagtcca

SEQ ID NO: 2139096 - DNA, 15 bp, Homo sapiens
atggctggagtccag

SEQ ID NO: 2139097 - DNA, 15 bp, Homo sapiens
tggctggagtccagt

SEQ ID NO: 2139098 - DNA, 15 bp, Homo sapiens
ggctggagtccagtc

SEQ ID NO: 2139099 - DNA, 15 bp, Homo sapiens
gctggagtccagtcg

SEQ ID NO: 2139100 - DNA, 15 bp, Homo sapiens
ctggagtccagtcgt

SEQ ID NO: 2139101 - DNA, 15 bp, Homo sapiens
tggagtccagtcgtt

SEQ ID NO: 2139102 - DNA, 15 bp, Homo sapiens
ggagtccagtcgttg

SEQ ID NO: 2139103 - DNA, 15 bp, Homo sapiens
gagtccagtcgttgt

SEQ ID NO: 2139104 - DNA, 15 bp, Homo sapiens
agtccagtcgttgtg

SEQ ID NO: 2139105 - DNA, 15 bp, Homo sapiens
gtccagtcgttgtgc

SEQ ID NO: 2139106 - DNA, 15 bp, Homo sapiens
tccagtcgttgtgct

SEQ ID NO: 2139107 - DNA, 15 bp, Homo sapiens
ccagtcgttgtgctc

SEQ ID NO: 2139108 - DNA, 15 bp, Homo sapiens
cagtcgttgtgctcc

SEQ ID NO: 2139109 - DNA, 15 bp, Homo sapiens
agtcgttgtgctcct

SEQ ID NO: 2139110 - DNA, 15 bp, Homo sapiens
gtcgttgtgctcctc

SEQ ID NO: 2139111 - DNA, 15 bp, Homo sapiens
tcgttgtgctcctcc

SEQ ID NO: 2139112 - DNA, 15 bp, Homo sapiens
cgttgtgctcctccc

SEQ ID NO: 2139113 - DNA, 15 bp, Homo sapiens
gttgtgctcctccca

SEQ ID NO: 2139114 - DNA, 15 bp, Homo sapiens
ttgtgctcctcccat

SEQ ID NO: 2139115 - DNA, 15 bp, Homo sapiens
tgtgctcctcccatt

SEQ ID NO: 2139116 - DNA, 15 bp, Homo sapiens
gtgctcctcccattg

SEQ ID NO: 2139117 - DNA, 15 bp, Homo sapiens
tgctcctcccattgt

SEQ ID NO: 2139118 - DNA, 15 bp, Homo sapiens
gctcctcccattgtg

SEQ ID NO: 2139119 - DNA, 15 bp, Homo sapiens
ctcctcccattgtga

SEQ ID NO: 2139120 - DNA, 15 bp, Homo sapiens
tcctcccattgtgag

SEQ ID NO: 2139121 - DNA, 15 bp, Homo sapiens
cctcccattgtgagc

SEQ ID NO: 2139122 - DNA, 15 bp, Homo sapiens
ctcccattgtgagct

SEQ ID NO: 2139123 - DNA, 15 bp, Homo sapiens
tcccattgtgagcta

SEQ ID NO: 2139124 - DNA, 15 bp, Homo sapiens
cccattgtgagctag

SEQ ID NO: 2139125 - DNA, 15 bp, Homo sapiens
ccattgtgagctaga

SEQ ID NO: 2139126 - DNA, 15 bp, Homo sapiens
cattgtgagctagaa

SEQ ID NO: 2139127 - DNA, 15 bp, Homo sapiens
attgtgagctagaat

SEQ ID NO: 2139128 - DNA, 15 bp, Homo sapiens
ttgtgagctagaata

SEQ ID NO: 2139129 - DNA, 15 bp, Homo sapiens
tgtgagctagaatac

SEQ ID NO: 2139130 - DNA, 15 bp, Homo sapiens
gtgagctagaatact

SEQ ID NO: 2139131 - DNA, 15 bp, Homo sapiens
tgagctagaatactc

SEQ ID NO: 2139132 - DNA, 15 bp, Homo sapiens
gagctagaatactca

SEQ ID NO: 2139133 - DNA, 15 bp, Homo sapiens
agctagaatactcac

SEQ ID NO: 2139134 - DNA, 15 bp, Homo sapiens
gctagaatactcaca

SEQ ID NO: 2139135 - DNA, 15 bp, Homo sapiens
ctagaatactcacag

SEQ ID NO: 2139136 - DNA, 15 bp, Homo sapiens
tagaatactcacagt

SEQ ID NO: 2139137 - DNA, 15 bp, Homo sapiens
agaatactcacagtt

SEQ ID NO: 2139138 - DNA, 15 bp, Homo sapiens
gaatactcacagttg

SEQ ID NO: 2139139 - DNA, 15 bp, Homo sapiens
aatactcacagttgc

SEQ ID NO: 2139140 - DNA, 15 bp, Homo sapiens
atactcacagttgct

SEQ ID NO: 2139141 - DNA, 15 bp, Homo sapiens
tactcacagttgcta

SEQ ID NO: 2139142 - DNA, 15 bp, Homo sapiens
actcacagttgctac

SEQ ID NO: 2139143 - DNA, 15 bp, Homo sapiens
ctcacagttgctact

SEQ ID NO: 2139144 - DNA, 15 bp, Homo sapiens
tcacagttgctactt

SEQ ID NO: 2139145 - DNA, 15 bp, Homo sapiens
cacagttgctacttc

SEQ ID NO: 2139146 - DNA, 15 bp, Homo sapiens
acagttgctacttcc

SEQ ID NO: 2139147 - DNA, 15 bp, Homo sapiens
cagttgctacttcct

SEQ ID NO: 2139148 - DNA, 15 bp, Homo sapiens
agttgctacttcctg

SEQ ID NO: 2139149 - DNA, 15 bp, Homo sapiens
gttgctacttcctga

SEQ ID NO: 2139150 - DNA, 15 bp, Homo sapiens
ttgctacttcctgaa

SEQ ID NO: 2139151 - DNA, 15 bp, Homo sapiens
tgctacttcctgaag

SEQ ID NO: 2139152 - DNA, 15 bp, Homo sapiens
gctacttcctgaaga

SEQ ID NO: 2139153 - DNA, 15 bp, Homo sapiens
ctacttcctgaagaa

SEQ ID NO: 2139154 - DNA, 15 bp, Homo sapiens
tacttcctgaagaac

SEQ ID NO: 2139155 - DNA, 15 bp, Homo sapiens
acttcctgaagaact

SEQ ID NO: 2139156 - DNA, 15 bp, Homo sapiens
cttcctgaagaactg

SEQ ID NO: 2139157 - DNA, 15 bp, Homo sapiens
ttcctgaagaactgg

SEQ ID NO: 2139158 - DNA, 15 bp, Homo sapiens
tcctgaagaactgga

SEQ ID NO: 2139159 - DNA, 15 bp, Homo sapiens
cctgaagaactggaa

SEQ ID NO: 2139160 - DNA, 15 bp, Homo sapiens
ctgaagaactggaaa

SEQ ID NO: 2139161 - DNA, 15 bp, Homo sapiens
tgaagaactggaaaa

SEQ ID NO: 2139162 - DNA, 15 bp, Homo sapiens
gaagaactggaaaac

SEQ ID NO: 2139163 - DNA, 15 bp, Homo sapiens
aagaactggaaaact

SEQ ID NO: 2139164 - DNA, 15 bp, Homo sapiens
agaactggaaaactt

SEQ ID NO: 2139165 - DNA, 15 bp, Homo sapiens
gaactggaaaacttg

SEQ ID NO: 2139166 - DNA, 15 bp, Homo sapiens
aactggaaaacttgt

SEQ ID NO: 2139167 - DNA, 15 bp, Homo sapiens
actggaaaacttgtc

SEQ ID NO: 2139168 - DNA, 15 bp, Homo sapiens
ctggaaaacttgtct

SEQ ID NO: 2139169 - DNA, 15 bp, Homo sapiens
tggaaaacttgtctg

SEQ ID NO: 2139170 - DNA, 15 bp, Homo sapiens
ggaaaacttgtctgc

SEQ ID NO: 2139171 - DNA, 15 bp, Homo sapiens
gaaaacttgtctgcc

SEQ ID NO: 2139172 - DNA, 15 bp, Homo sapiens
aaaacttgtctgcca

SEQ ID NO: 2139173 - DNA, 15 bp, Homo sapiens
aaacttgtctgccat

SEQ ID NO: 2139174 - DNA, 15 bp, Homo sapiens
aacttgtctgccata

SEQ ID NO: 2139175 - DNA, 15 bp, Homo sapiens
acttgtctgccatag

SEQ ID NO: 2139176 - DNA, 15 bp, Homo sapiens
cttgtctgccatagt

SEQ ID NO: 2139177 - DNA, 15 bp, Homo sapiens
ttgtctgccatagta

SEQ ID NO: 2139178 - DNA, 15 bp, Homo sapiens
tgtctgccatagtat

SEQ ID NO: 2139179 - DNA, 15 bp, Homo sapiens
gtctgccatagtatc

SEQ ID NO: 2139180 - DNA, 15 bp, Homo sapiens
tctgccatagtatcc

SEQ ID NO: 2139181 - DNA, 15 bp, Homo sapiens
ctgccatagtatccc

SEQ ID NO: 2139182 - DNA, 15 bp, Homo sapiens
tgccatagtatccca

SEQ ID NO: 2139183 - DNA, 15 bp, Homo sapiens
gccatagtatcccat

SEQ ID NO: 2139184 - DNA, 15 bp, Homo sapiens
ccatagtatcccata

SEQ ID NO: 2139185 - DNA, 15 bp, Homo sapiens
catagtatcccatag

SEQ ID NO: 2139186 - DNA, 15 bp, Homo sapiens
atagtatcccatagc

SEQ ID NO: 2139187 - DNA, 15 bp, Homo sapiens
tagtatcccatagca

SEQ ID NO: 2139188 - DNA, 15 bp, Homo sapiens
agtatcccatagcat

SEQ ID NO: 2139189 - DNA, 15 bp, Homo sapiens
gtatcccatagcatt

SEQ ID NO: 2139190 - DNA, 15 bp, Homo sapiens
tatcccatagcattt

SEQ ID NO: 2139191 - DNA, 15 bp, Homo sapiens
atcccatagcatttg

SEQ ID NO: 2139192 - DNA, 15 bp, Homo sapiens
tcccatagcatttgg

SEQ ID NO: 2139193 - DNA, 15 bp, Homo sapiens
cccatagcatttgga

SEQ ID NO: 2139194 - DNA, 15 bp, Homo sapiens
ccatagcatttggat

SEQ ID NO: 2139195 - DNA, 15 bp, Homo sapiens
catagcatttggatt

SEQ ID NO: 2139196 - DNA, 15 bp, Homo sapiens
atagcatttggattg

SEQ ID NO: 2139197 - DNA, 15 bp, Homo sapiens
tagcatttggattgt

SEQ ID NO: 2139198 - DNA, 15 bp, Homo sapiens
agcatttggattgtg

SEQ ID NO: 2139199 - DNA, 15 bp, Homo sapiens
gcatttggattgtgg

SEQ ID NO: 2139200 - DNA, 15 bp, Homo sapiens
catttggattgtgga

SEQ ID NO: 2139201 - DNA, 15 bp, Homo sapiens
atttggattgtggac

SEQ ID NO: 2139202 - DNA, 15 bp, Homo sapiens
tttggattgtggaca

SEQ ID NO: 2139203 - DNA, 15 bp, Homo sapiens
ttggattgtggacat

SEQ ID NO: 2139204 - DNA, 15 bp, Homo sapiens
tggattgtggacata

SEQ ID NO: 2139205 - DNA, 15 bp, Homo sapiens
ggattgtggacatag

SEQ ID NO: 2139206 - DNA, 15 bp, Homo sapiens
gattgtggacatagg

SEQ ID NO: 2139207 - DNA, 15 bp, Homo sapiens
attgtggacatagga

SEQ ID NO: 2139208 - DNA, 15 bp, Homo sapiens
ttgtggacataggag

SEQ ID NO: 2139209 - DNA, 15 bp, Homo sapiens
tgtggacataggagg

SEQ ID NO: 2139210 - DNA, 15 bp, Homo sapiens
gtggacataggagga

SEQ ID NO: 2139211 - DNA, 15 bp, Homo sapiens
tggacataggaggac

SEQ ID NO: 2139212 - DNA, 15 bp, Homo sapiens
ggacataggaggaca

SEQ ID NO: 2139213 - DNA, 15 bp, Homo sapiens
gacataggaggacag

SEQ ID NO: 2139214 - DNA, 15 bp, Homo sapiens
acataggaggacagc

SEQ ID NO: 2139215 - DNA, 15 bp, Homo sapiens
cataggaggacagct

SEQ ID NO: 2139216 - DNA, 15 bp, Homo sapiens
ataggaggacagctg

SEQ ID NO: 2139217 - DNA, 15 bp, Homo sapiens
taggaggacagctga

SEQ ID NO: 2139218 - DNA, 15 bp, Homo sapiens
aggaggacagctgat

SEQ ID NO: 2139219 - DNA, 15 bp, Homo sapiens
ggaggacagctgatg

SEQ ID NO: 2139220 - DNA, 15 bp, Homo sapiens
gaggacagctgatgc

SEQ ID NO: 2139221 - DNA, 15 bp, Homo sapiens
aggacagctgatgca

SEQ ID NO: 2139222 - DNA, 15 bp, Homo sapiens
ggacagctgatgcaa

SEQ ID NO: 2139223 - DNA, 15 bp, Homo sapiens
gacagctgatgcaac

SEQ ID NO: 2139224 - DNA, 15 bp, Homo sapiens
acagctgatgcaacc

SEQ ID NO: 2139225 - DNA, 15 bp, Homo sapiens
cagctgatgcaacct

SEQ ID NO: 2139226 - DNA, 15 bp, Homo sapiens
agctgatgcaacctg

SEQ ID NO: 2139227 - DNA, 15 bp, Homo sapiens
gctgatgcaacctga

SEQ ID NO: 2139228 - DNA, 15 bp, Homo sapiens
ctgatgcaacctgaa

SEQ ID NO: 2139229 - DNA, 15 bp, Homo sapiens
tgatgcaacctgaat

SEQ ID NO: 2139230 - DNA, 15 bp, Homo sapiens
gatgcaacctgaatc

SEQ ID NO: 2139231 - DNA, 15 bp, Homo sapiens
atgcaacctgaatct

SEQ ID NO: 2139232 - DNA, 15 bp, Homo sapiens
tgcaacctgaatctg

SEQ ID NO: 2139233 - DNA, 15 bp, Homo sapiens
gcaacctgaatctgc

SEQ ID NO: 2139234 - DNA, 15 bp, Homo sapiens
caacctgaatctgca

SEQ ID NO: 2139235 - DNA, 15 bp, Homo sapiens
aacctgaatctgcag

SEQ ID NO: 2139236 - DNA, 15 bp, Homo sapiens
acctgaatctgcagg

SEQ ID NO: 2139237 - DNA, 15 bp, Homo sapiens
cctgaatctgcaggg

SEQ ID NO: 2139238 - DNA, 15 bp, Homo sapiens
ctgaatctgcaggga

SEQ ID NO: 2139239 - DNA, 15 bp, Homo sapiens
tgaatctgcagggag

SEQ ID NO: 2139240 - DNA, 15 bp, Homo sapiens
gaatctgcagggaga

SEQ ID NO: 2139241 - DNA, 15 bp, Homo sapiens
aatctgcagggagat

SEQ ID NO: 2139242 - DNA, 15 bp, Homo sapiens
atctgcagggagata

SEQ ID NO: 2139243 - DNA, 15 bp, Homo sapiens
tctgcagggagatag

SEQ ID NO: 2139244 - DNA, 15 bp, Homo sapiens
ctgcagggagataga

SEQ ID NO: 2139245 - DNA, 15 bp, Homo sapiens
tgcagggagatagac

SEQ ID NO: 2139246 - DNA, 15 bp, Homo sapiens
gcagggagatagacc

SEQ ID NO: 2139247 - DNA, 15 bp, Homo sapiens
cagggagatagacca

SEQ ID NO: 2139248 - DNA, 15 bp, Homo sapiens
agggagatagaccat

SEQ ID NO: 2139249 - DNA, 15 bp, Homo sapiens
gggagatagaccatg

SEQ ID NO: 2139250 - DNA, 15 bp, Homo sapiens
ggagatagaccatga

SEQ ID NO: 2139251 - DNA, 15 bp, Homo sapiens
gagatagaccatgag

SEQ ID NO: 2139252 - DNA, 15 bp, Homo sapiens
agatagaccatgaga

SEQ ID NO: 2139253 - DNA, 15 bp, Homo sapiens
gatagaccatgagac

SEQ ID NO: 2139254 - DNA, 15 bp, Homo sapiens
atagaccatgagaca

SEQ ID NO: 2139255 - DNA, 15 bp, Homo sapiens
tagaccatgagacag

SEQ ID NO: 2139256 - DNA, 15 bp, Homo sapiens
agaccatgagacaga

SEQ ID NO: 2139257 - DNA, 15 bp, Homo sapiens
gaccatgagacagaa

SEQ ID NO: 2139258 - DNA, 15 bp, Homo sapiens
accatgagacagaag

SEQ ID NO: 2139259 - DNA, 15 bp, Homo sapiens
ccatgagacagaagg

SEQ ID NO: 2139260 - DNA, 15 bp, Homo sapiens
catgagacagaaggc

SEQ ID NO: 2139261 - DNA, 15 bp, Homo sapiens
atgagacagaaggcc

SEQ ID NO: 2139262 - DNA, 15 bp, Homo sapiens
tgagacagaaggccg

SEQ ID NO: 2139263 - DNA, 15 bp, Homo sapiens
gagacagaaggccgg

SEQ ID NO: 2139264 - DNA, 15 bp, Homo sapiens
agacagaaggccggt

SEQ ID NO: 2139265 - DNA, 15 bp, Homo sapiens
gacagaaggccggtt

SEQ ID NO: 2139266 - DNA, 15 bp, Homo sapiens
acagaaggccggttg

SEQ ID NO: 2139267 - DNA, 15 bp, Homo sapiens
cagaaggccggttgt

SEQ ID NO: 2139268 - DNA, 15 bp, Homo sapiens
agaaggccggttgtt

SEQ ID NO: 2139269 - DNA, 15 bp, Homo sapiens
gaaggccggttgtta

SEQ ID NO: 2139270 - DNA, 15 bp, Homo sapiens
aaggccggttgttag

SEQ ID NO: 2139271 - DNA, 15 bp, Homo sapiens
aggccggttgttaga

SEQ ID NO: 2139272 - DNA, 15 bp, Homo sapiens
ggccggttgttagag

SEQ ID NO: 2139273 - DNA, 15 bp, Homo sapiens
gccggttgttagagt

SEQ ID NO: 2139274 - DNA, 15 bp, Homo sapiens
ccggttgttagagta

SEQ ID NO: 2139275 - DNA, 15 bp, Homo sapiens
cggttgttagagtac

SEQ ID NO: 2139276 - DNA, 15 bp, Homo sapiens
ggttgttagagtacc

SEQ ID NO: 2139277 - DNA, 15 bp, Homo sapiens
gttgttagagtacct

SEQ ID NO: 2139278 - DNA, 15 bp, Homo sapiens
ttgttagagtacctt

SEQ ID NO: 2139279 - DNA, 15 bp, Homo sapiens
tgttagagtaccttg

SEQ ID NO: 2139280 - DNA, 15 bp, Homo sapiens
gttagagtaccttgc

SEQ ID NO: 2139281 - DNA, 15 bp, Homo sapiens
ttagagtaccttgca

SEQ ID NO: 2139282 - DNA, 15 bp, Homo sapiens
tagagtaccttgcat

SEQ ID NO: 2139283 - DNA, 15 bp, Homo sapiens
agagtaccttgcatg

SEQ ID NO: 2139284 - DNA, 15 bp, Homo sapiens
gagtaccttgcatgg

SEQ ID NO: 2139285 - DNA, 15 bp, Homo sapiens
agtaccttgcatggt

SEQ ID NO: 2139286 - DNA, 15 bp, Homo sapiens
gtaccttgcatggta

SEQ ID NO: 2139287 - DNA, 15 bp, Homo sapiens
taccttgcatggtac

SEQ ID NO: 2139288 - DNA, 15 bp, Homo sapiens
accttgcatggtacc

SEQ ID NO: 2139289 - DNA, 15 bp, Homo sapiens
ccttgcatggtacca

SEQ ID NO: 2139290 - DNA, 15 bp, Homo sapiens
cttgcatggtaccat

SEQ ID NO: 2139291 - DNA, 15 bp, Homo sapiens
ttgcatggtaccatc

SEQ ID NO: 2139292 - DNA, 15 bp, Homo sapiens
tgcatggtaccatcc

SEQ ID NO: 2139293 - DNA, 15 bp, Homo sapiens
gcatggtaccatcct

SEQ ID NO: 2139294 - DNA, 15 bp, Homo sapiens
catggtaccatccta

SEQ ID NO: 2139295 - DNA, 15 bp, Homo sapiens
atggtaccatcctat

SEQ ID NO: 2139296 - DNA, 15 bp, Homo sapiens
tggtaccatcctata

SEQ ID NO: 2139297 - DNA, 15 bp, Homo sapiens
ggtaccatcctataa

SEQ ID NO: 2139298 - DNA, 15 bp, Homo sapiens
gtaccatcctataat

SEQ ID NO: 2139299 - DNA, 15 bp, Homo sapiens
taccatcctataatg

SEQ ID NO: 2139300 - DNA, 15 bp, Homo sapiens
accatcctataatgc

SEQ ID NO: 2139301 - DNA, 15 bp, Homo sapiens
ccatcctataatgcc

SEQ ID NO: 2139302 - DNA, 15 bp, Homo sapiens
catcctataatgcca

SEQ ID NO: 2139303 - DNA, 15 bp, Homo sapiens
atcctataatgccaa

SEQ ID NO: 2139304 - DNA, 15 bp, Homo sapiens
tcctataatgccaaa

SEQ ID NO: 2139305 - DNA, 15 bp, Homo sapiens
cctataatgccaaac

SEQ ID NO: 2139306 - DNA, 15 bp, Homo sapiens
ctataatgccaaacc

SEQ ID NO: 2139307 - DNA, 15 bp, Homo sapiens
tataatgccaaacca

SEQ ID NO: 2139308 - DNA, 15 bp, Homo sapiens
ataatgccaaaccaa

SEQ ID NO: 2139309 - DNA, 15 bp, Homo sapiens
taatgccaaaccaat

SEQ ID NO: 2139310 - DNA, 15 bp, Homo sapiens
aatgccaaaccaatc

SEQ ID NO: 2139311 - DNA, 15 bp, Homo sapiens
atgccaaaccaatct

SEQ ID NO: 2139312 - DNA, 15 bp, Homo sapiens
tgccaaaccaatctt

SEQ ID NO: 2139313 - DNA, 15 bp, Homo sapiens
gccaaaccaatcttc

SEQ ID NO: 2139314 - DNA, 15 bp, Homo sapiens
ccaaaccaatcttct

SEQ ID NO: 2139315 - DNA, 15 bp, Homo sapiens
caaaccaatcttctc

SEQ ID NO: 2139316 - DNA, 15 bp, Homo sapiens
aaaccaatcttctca

SEQ ID NO: 2139317 - DNA, 15 bp, Homo sapiens
aaccaatcttctcac

SEQ ID NO: 2139318 - DNA, 15 bp, Homo sapiens
accaatcttctcact

SEQ ID NO: 2139319 - DNA, 15 bp, Homo sapiens
ccaatcttctcactg

SEQ ID NO: 2139320 - DNA, 15 bp, Homo sapiens
caatcttctcactgt

SEQ ID NO: 2139321 - DNA, 15 bp, Homo sapiens
aatcttctcactgtc

SEQ ID NO: 2139322 - DNA, 15 bp, Homo sapiens
atcttctcactgtca

SEQ ID NO: 2139323 - DNA, 15 bp, Homo sapiens
tcttctcactgtcac

SEQ ID NO: 2139324 - DNA, 15 bp, Homo sapiens
cttctcactgtcacc

SEQ ID NO: 2139325 - DNA, 15 bp, Homo sapiens
ttctcactgtcacct

SEQ ID NO: 2139326 - DNA, 15 bp, Homo sapiens
tctcactgtcacctc

SEQ ID NO: 2139327 - DNA, 15 bp, Homo sapiens
ctcactgtcacctct

SEQ ID NO: 2139328 - DNA, 15 bp, Homo sapiens
tcactgtcacctctc

SEQ ID NO: 2139329 - DNA, 15 bp, Homo sapiens
cactgtcacctctca

SEQ ID NO: 2139330 - DNA, 15 bp, Homo sapiens
actgtcacctctcat

SEQ ID NO: 2139331 - DNA, 15 bp, Homo sapiens
ctgtcacctctcatg

SEQ ID NO: 2139332 - DNA, 15 bp, Homo sapiens
tgtcacctctcatgt

SEQ ID NO: 2139333 - DNA, 15 bp, Homo sapiens
gtcacctctcatgtt

SEQ ID NO: 2139334 - DNA, 15 bp, Homo sapiens
tcacctctcatgttt

SEQ ID NO: 2139335 - DNA, 15 bp, Homo sapiens
cacctctcatgtttg

SEQ ID NO: 2139336 - DNA, 15 bp, Homo sapiens
acctctcatgtttga

SEQ ID NO: 2139337 - DNA, 15 bp, Homo sapiens
cctctcatgtttgaa

SEQ ID NO: 2139338 - DNA, 15 bp, Homo sapiens
ctctcatgtttgaat

SEQ ID NO: 2139339 - DNA, 15 bp, Homo sapiens
tctcatgtttgaata

SEQ ID NO: 2139340 - DNA, 15 bp, Homo sapiens
ctcatgtttgaataa

SEQ ID NO: 2139341 - DNA, 15 bp, Homo sapiens
tcatgtttgaataat

SEQ ID NO: 2139342 - DNA, 15 bp, Homo sapiens
catgtttgaataata

SEQ ID NO: 2139343 - DNA, 15 bp, Homo sapiens
atgtttgaataataa

SEQ ID NO: 2139344 - DNA, 15 bp, Homo sapiens
tgtttgaataataat

SEQ ID NO: 2139345 - DNA, 15 bp, Homo sapiens
gtttgaataataatt

SEQ ID NO: 2139346 - DNA, 15 bp, Homo sapiens
tttgaataataattg

SEQ ID NO: 2139347 - DNA, 15 bp, Homo sapiens
ttgaataataattgg

SEQ ID NO: 2139348 - DNA, 15 bp, Homo sapiens
tgaataataattgga

SEQ ID NO: 2139349 - DNA, 15 bp, Homo sapiens
gaataataattggaa

SEQ ID NO: 2139350 - DNA, 15 bp, Homo sapiens
aataataattggaaa

SEQ ID NO: 2139351 - DNA, 15 bp, Homo sapiens
ataataattggaaag

SEQ ID NO: 2139352 - DNA, 15 bp, Homo sapiens
taataattggaaaga

SEQ ID NO: 2139353 - DNA, 15 bp, Homo sapiens
aataattggaaagag

SEQ ID NO: 2139354 - DNA, 15 bp, Homo sapiens
ataattggaaagagc

SEQ ID NO: 2139355 - DNA, 15 bp, Homo sapiens
taattggaaagagca

SEQ ID NO: 2139356 - DNA, 15 bp, Homo sapiens
aattggaaagagcaa

SEQ ID NO: 2139357 - DNA, 15 bp, Homo sapiens
attggaaagagcaag

SEQ ID NO: 2139358 - DNA, 15 bp, Homo sapiens
ttggaaagagcaaga

SEQ ID NO: 2139359 - DNA, 15 bp, Homo sapiens
tggaaagagcaagac

SEQ ID NO: 2139360 - DNA, 15 bp, Homo sapiens
ggaaagagcaagact

SEQ ID NO: 2139361 - DNA, 15 bp, Homo sapiens
gaaagagcaagactt

SEQ ID NO: 2139362 - DNA, 15 bp, Homo sapiens
aaagagcaagactta

SEQ ID NO: 2139363 - DNA, 15 bp, Homo sapiens
aagagcaagacttag

SEQ ID NO: 2139364 - DNA, 15 bp, Homo sapiens
agagcaagacttagc

SEQ ID NO: 2139365 - DNA, 15 bp, Homo sapiens
gagcaagacttagca

SEQ ID NO: 2139366 - DNA, 15 bp, Homo sapiens
agcaagacttagcag

SEQ ID NO: 2139367 - DNA, 15 bp, Homo sapiens
gcaagacttagcagg

SEQ ID NO: 2139368 - DNA, 15 bp, Homo sapiens
caagacttagcaggg

SEQ ID NO: 2139369 - DNA, 15 bp, Homo sapiens
aagacttagcaggga

SEQ ID NO: 2139370 - DNA, 15 bp, Homo sapiens
agacttagcagggaa

SEQ ID NO: 2139371 - DNA, 15 bp, Homo sapiens
gacttagcagggaat

SEQ ID NO: 2139372 - DNA, 15 bp, Homo sapiens
acttagcagggaata

SEQ ID NO: 2139373 - DNA, 15 bp, Homo sapiens
cttagcagggaataa

SEQ ID NO: 2139374 - DNA, 15 bp, Homo sapiens
ttagcagggaataaa

SEQ ID NO: 2139375 - DNA, 15 bp, Homo sapiens
tagcagggaataaag

SEQ ID NO: 2139376 - DNA, 15 bp, Homo sapiens
agcagggaataaagt

SEQ ID NO: 2139377 - DNA, 15 bp, Homo sapiens
gcagggaataaagtt

SEQ ID NO: 2139378 - DNA, 15 bp, Homo sapiens
cagggaataaagtta

SEQ ID NO: 2139379 - DNA, 15 bp, Homo sapiens
agggaataaagttac

SEQ ID NO: 2139380 - DNA, 15 bp, Homo sapiens
gggaataaagttact

SEQ ID NO: 2139381 - DNA, 15 bp, Homo sapiens
ggaataaagttactt

SEQ ID NO: 2139382 - DNA, 15 bp, Homo sapiens
gaataaagttacttt

SEQ ID NO: 2139383 - DNA, 15 bp, Homo sapiens
aataaagttactttt

SEQ ID NO: 2139384 - DNA, 15 bp, Homo sapiens
ataaagttacttttg

SEQ ID NO: 2139385 - DNA, 15 bp, Homo sapiens
taaagttacttttga

SEQ ID NO: 2139386 - DNA, 15 bp, Homo sapiens
aaagttacttttgag

SEQ ID NO: 2139387 - DNA, 15 bp, Homo sapiens
aagttacttttgagc

SEQ ID NO: 2139388 - DNA, 15 bp, Homo sapiens
agttacttttgagct

SEQ ID NO: 2139389 - DNA, 15 bp, Homo sapiens
gttacttttgagcta

SEQ ID NO: 2139390 - DNA, 15 bp, Homo sapiens
ttacttttgagctac

SEQ ID NO: 2139391 - DNA, 15 bp, Homo sapiens
tacttttgagctacc

SEQ ID NO: 2139392 - DNA, 15 bp, Homo sapiens
acttttgagctacca

SEQ ID NO: 2139393 - DNA, 15 bp, Homo sapiens
cttttgagctaccaa

SEQ ID NO: 2139394 - DNA, 15 bp, Homo sapiens
ttttgagctaccaat

SEQ ID NO: 2139395 - DNA, 15 bp, Homo sapiens
tttgagctaccaatt

SEQ ID NO: 2139396 - DNA, 15 bp, Homo sapiens
ttgagctaccaattt

SEQ ID NO: 2139397 - DNA, 15 bp, Homo sapiens
tgagctaccaatttt

SEQ ID NO: 2139398 - DNA, 15 bp, Homo sapiens
gagctaccaatttta

SEQ ID NO: 2139399 - DNA, 15 bp, Homo sapiens
agctaccaattttac

SEQ ID NO: 2139400 - DNA, 15 bp, Homo sapiens
gctaccaattttact

SEQ ID NO: 2139401 - DNA, 15 bp, Homo sapiens
ctaccaattttacta

SEQ ID NO: 2139402 - DNA, 15 bp, Homo sapiens
taccaattttactac

SEQ ID NO: 2139403 - DNA, 15 bp, Homo sapiens
accaattttactact

SEQ ID NO: 2139404 - DNA, 15 bp, Homo sapiens
ccaattttactactt

SEQ ID NO: 2139405 - DNA, 15 bp, Homo sapiens
caattttactactta

SEQ ID NO: 2139406 - DNA, 15 bp, Homo sapiens
aattttactacttaa

SEQ ID NO: 2139407 - DNA, 15 bp, Homo sapiens
attttactacttaaa

SEQ ID NO: 2139408 - DNA, 15 bp, Homo sapiens
ttttactacttaaaa

SEQ ID NO: 2139409 - DNA, 15 bp, Homo sapiens
tttactacttaaaaa

SEQ ID NO: 2139410 - DNA, 15 bp, Homo sapiens
ttactacttaaaaag

SEQ ID NO: 2139411 - DNA, 15 bp, Homo sapiens
tactacttaaaaagt

SEQ ID NO: 2139412 - DNA, 15 bp, Homo sapiens
actacttaaaaagtg

SEQ ID NO: 2139413 - DNA, 15 bp, Homo sapiens
ctacttaaaaagtgg

SEQ ID NO: 2139414 - DNA, 15 bp, Homo sapiens
tacttaaaaagtggt

SEQ ID NO: 2139415 - DNA, 15 bp, Homo sapiens
acttaaaaagtggtg

SEQ ID NO: 2139416 - DNA, 15 bp, Homo sapiens
cttaaaaagtggtga

SEQ ID NO: 2139417 - DNA, 15 bp, Homo sapiens
ttaaaaagtggtgaa

SEQ ID NO: 2139418 - DNA, 15 bp, Homo sapiens
taaaaagtggtgaat

SEQ ID NO: 2139419 - DNA, 15 bp, Homo sapiens
aaaaagtggtgaata

SEQ ID NO: 2139420 - DNA, 15 bp, Homo sapiens
aaaagtggtgaatag

SEQ ID NO: 2139421 - DNA, 15 bp, Homo sapiens
aaagtggtgaatagg

SEQ ID NO: 2139422 - DNA, 15 bp, Homo sapiens
aagtggtgaataggt

SEQ ID NO: 2139423 - DNA, 15 bp, Homo sapiens
agtggtgaataggta

SEQ ID NO: 2139424 - DNA, 15 bp, Homo sapiens
gtggtgaataggtag

SEQ ID NO: 2139425 - DNA, 15 bp, Homo sapiens
tggtgaataggtaga

SEQ ID NO: 2139426 - DNA, 15 bp, Homo sapiens
ggtgaataggtagag

SEQ ID NO: 2139427 - DNA, 15 bp, Homo sapiens
gtgaataggtagaga

SEQ ID NO: 2139428 - DNA, 15 bp, Homo sapiens
tgaataggtagagat

SEQ ID NO: 2139429 - DNA, 15 bp, Homo sapiens
gaataggtagagatg

SEQ ID NO: 2139430 - DNA, 15 bp, Homo sapiens
aataggtagagatgg

SEQ ID NO: 2139431 - DNA, 15 bp, Homo sapiens
ataggtagagatgga

SEQ ID NO: 2139432 - DNA, 15 bp, Homo sapiens
taggtagagatggat

SEQ ID NO: 2139433 - DNA, 15 bp, Homo sapiens
aggtagagatggatt

SEQ ID NO: 2139434 - DNA, 15 bp, Homo sapiens
ggtagagatggattc

SEQ ID NO: 2139435 - DNA, 15 bp, Homo sapiens
gtagagatggattcc

SEQ ID NO: 2139436 - DNA, 15 bp, Homo sapiens
tagagatggattcca

SEQ ID NO: 2139437 - DNA, 15 bp, Homo sapiens
agagatggattccag

SEQ ID NO: 2139438 - DNA, 15 bp, Homo sapiens
gagatggattccagt

SEQ ID NO: 2139439 - DNA, 15 bp, Homo sapiens
agatggattccagtt

SEQ ID NO: 2139440 - DNA, 15 bp, Homo sapiens
gatggattccagttg

SEQ ID NO: 2139441 - DNA, 15 bp, Homo sapiens
atggattccagttgt

SEQ ID NO: 2139442 - DNA, 15 bp, Homo sapiens
tggattccagttgtc

SEQ ID NO: 2139443 - DNA, 15 bp, Homo sapiens
ggattccagttgtcc

SEQ ID NO: 2139444 - DNA, 15 bp, Homo sapiens
gattccagttgtcct

SEQ ID NO: 2139445 - DNA, 15 bp, Homo sapiens
attccagttgtcctc

SEQ ID NO: 2139446 - DNA, 15 bp, Homo sapiens
ttccagttgtcctca

SEQ ID NO: 2139447 - DNA, 15 bp, Homo sapiens
tccagttgtcctcac

SEQ ID NO: 2139448 - DNA, 15 bp, Homo sapiens
ccagttgtcctcacc

SEQ ID NO: 2139449 - DNA, 15 bp, Homo sapiens
cagttgtcctcacca

SEQ ID NO: 2139450 - DNA, 15 bp, Homo sapiens
agttgtcctcaccat

SEQ ID NO: 2139451 - DNA, 15 bp, Homo sapiens
gttgtcctcaccata

SEQ ID NO: 2139452 - DNA, 15 bp, Homo sapiens
ttgtcctcaccatag

SEQ ID NO: 2139453 - DNA, 15 bp, Homo sapiens
tgtcctcaccatagt

SEQ ID NO: 2139454 - DNA, 15 bp, Homo sapiens
gtcctcaccatagta

SEQ ID NO: 2139455 - DNA, 15 bp, Homo sapiens
tcctcaccatagtaa

SEQ ID NO: 2139456 - DNA, 15 bp, Homo sapiens
cctcaccatagtaag

SEQ ID NO: 2139457 - DNA, 15 bp, Homo sapiens
ctcaccatagtaagc

SEQ ID NO: 2139458 - DNA, 15 bp, Homo sapiens
tcaccatagtaagct

SEQ ID NO: 2139459 - DNA, 15 bp, Homo sapiens
caccatagtaagctg

SEQ ID NO: 2139460 - DNA, 15 bp, Homo sapiens
accatagtaagctgt

SEQ ID NO: 2139461 - DNA, 15 bp, Homo sapiens
ccatagtaagctgtt

SEQ ID NO: 2139462 - DNA, 15 bp, Homo sapiens
catagtaagctgttg

SEQ ID NO: 2139463 - DNA, 15 bp, Homo sapiens
atagtaagctgttgc

SEQ ID NO: 2139464 - DNA, 15 bp, Homo sapiens
tagtaagctgttgcc

SEQ ID NO: 2139465 - DNA, 15 bp, Homo sapiens
agtaagctgttgcct

SEQ ID NO: 2139466 - DNA, 15 bp, Homo sapiens
gtaagctgttgcctc

SEQ ID NO: 2139467 - DNA, 15 bp, Homo sapiens
taagctgttgcctcc

SEQ ID NO: 2139468 - DNA, 15 bp, Homo sapiens
aagctgttgcctcca

SEQ ID NO: 2139469 - DNA, 15 bp, Homo sapiens
agctgttgcctccaa

SEQ ID NO: 2139470 - DNA, 15 bp, Homo sapiens
gctgttgcctccaaa

SEQ ID NO: 2139471 - DNA, 15 bp, Homo sapiens
ctgttgcctccaaaa

SEQ ID NO: 2139472 - DNA, 15 bp, Homo sapiens
tgttgcctccaaaag

SEQ ID NO: 2139473 - DNA, 15 bp, Homo sapiens
gttgcctccaaaaga

SEQ ID NO: 2139474 - DNA, 15 bp, Homo sapiens
ttgcctccaaaagaa

SEQ ID NO: 2139475 - DNA, 15 bp, Homo sapiens
tgcctccaaaagaaa

SEQ ID NO: 2139476 - DNA, 15 bp, Homo sapiens
gcctccaaaagaaag

SEQ ID NO: 2139477 - DNA, 15 bp, Homo sapiens
cctccaaaagaaaga

SEQ ID NO: 2139478 - DNA, 15 bp, Homo sapiens
ctccaaaagaaagag

SEQ ID NO: 2139479 - DNA, 15 bp, Homo sapiens
tccaaaagaaagaga

SEQ ID NO: 2139480 - DNA, 15 bp, Homo sapiens
ccaaaagaaagagaa

SEQ ID NO: 2139481 - DNA, 15 bp, Homo sapiens
caaaagaaagagaat

SEQ ID NO: 2139482 - DNA, 15 bp, Homo sapiens
aaaagaaagagaatg

SEQ ID NO: 2139483 - DNA, 15 bp, Homo sapiens
aagaaagagaatgaa

SEQ ID NO: 2139484 - DNA, 15 bp, Homo sapiens
agaaagagaatgaac

SEQ ID NO: 2139485 - DNA, 15 bp, Homo sapiens
gaaagagaatgaacc

SEQ ID NO: 2139486 - DNA, 15 bp, Homo sapiens
aaagagaatgaacca

SEQ ID NO: 2139487 - DNA, 15 bp, Homo sapiens
aagagaatgaaccaa

SEQ ID NO: 2139488 - DNA, 15 bp, Homo sapiens
agagaatgaaccaag

SEQ ID NO: 2139489 - DNA, 15 bp, Homo sapiens
gagaatgaaccaaga

SEQ ID NO: 2139490 - DNA, 15 bp, Homo sapiens
agaatgaaccaagaa

SEQ ID NO: 2139491 - DNA, 15 bp, Homo sapiens
gaatgaaccaagaag

SEQ ID NO: 2139492 - DNA, 15 bp, Homo sapiens
aatgaaccaagaaga

SEQ ID NO: 2139493 - DNA, 15 bp, Homo sapiens
atgaaccaagaagaa

SEQ ID NO: 2139494 - DNA, 15 bp, Homo sapiens
tgaaccaagaagaat

SEQ ID NO: 2139495 - DNA, 15 bp, Homo sapiens
gaaccaagaagaata

SEQ ID NO: 2139496 - DNA, 15 bp, Homo sapiens
aaccaagaagaatat

SEQ ID NO: 2139497 - DNA, 15 bp, Homo sapiens
accaagaagaatata

SEQ ID NO: 2139498 - DNA, 15 bp, Homo sapiens
ccaagaagaatatag

SEQ ID NO: 2139499 - DNA, 15 bp, Homo sapiens
caagaagaatatagt

SEQ ID NO: 2139500 - DNA, 15 bp, Homo sapiens
aagaagaatatagtg

SEQ ID NO: 2139501 - DNA, 15 bp, Homo sapiens
agaagaatatagtgg

SEQ ID NO: 2139502 - DNA, 15 bp, Homo sapiens
gaagaatatagtgga

SEQ ID NO: 2139503 - DNA, 15 bp, Homo sapiens
aagaatatagtggac

SEQ ID NO: 2139504 - DNA, 15 bp, Homo sapiens
agaatatagtggaca

SEQ ID NO: 2139505 - DNA, 15 bp, Homo sapiens
gaatatagtggacac

SEQ ID NO: 2139506 - DNA, 15 bp, Homo sapiens
aatatagtggacact

SEQ ID NO: 2139507 - DNA, 15 bp, Homo sapiens
atatagtggacactg

SEQ ID NO: 2139508 - DNA, 15 bp, Homo sapiens
tatagtggacactgc

SEQ ID NO: 2139509 - DNA, 15 bp, Homo sapiens
atagtggacactgca

SEQ ID NO: 2139510 - DNA, 15 bp, Homo sapiens
tagtggacactgcat

SEQ ID NO: 2139511 - DNA, 15 bp, Homo sapiens
agtggacactgcata

SEQ ID NO: 2139512 - DNA, 15 bp, Homo sapiens
gtggacactgcatag

SEQ ID NO: 2139513 - DNA, 15 bp, Homo sapiens
tggacactgcatagt

SEQ ID NO: 2139514 - DNA, 15 bp, Homo sapiens
ggacactgcatagta

SEQ ID NO: 2139515 - DNA, 15 bp, Homo sapiens
gacactgcatagtat

SEQ ID NO: 2139516 - DNA, 15 bp, Homo sapiens
acactgcatagtatt

SEQ ID NO: 2139517 - DNA, 15 bp, Homo sapiens
cactgcatagtattg

SEQ ID NO: 2139518 - DNA, 15 bp, Homo sapiens
actgcatagtattgg

SEQ ID NO: 2139519 - DNA, 15 bp, Homo sapiens
ctgcatagtattggc

SEQ ID NO: 2139520 - DNA, 15 bp, Homo sapiens
tgcatagtattggct

SEQ ID NO: 2139521 - DNA, 15 bp, Homo sapiens
gcatagtattggctc

SEQ ID NO: 2139522 - DNA, 15 bp, Homo sapiens
catagtattggctca

SEQ ID NO: 2139523 - DNA, 15 bp, Homo sapiens
atagtattggctcaa

SEQ ID NO: 2139524 - DNA, 15 bp, Homo sapiens
tagtattggctcaac

SEQ ID NO: 2139525 - DNA, 15 bp, Homo sapiens
agtattggctcaact

SEQ ID NO: 2139526 - DNA, 15 bp, Homo sapiens
gtattggctcaacta

SEQ ID NO: 2139527 - DNA, 15 bp, Homo sapiens
tattggctcaactag

SEQ ID NO: 2139528 - DNA, 15 bp, Homo sapiens
attggctcaactaga

SEQ ID NO: 2139529 - DNA, 15 bp, Homo sapiens
ttggctcaactagat

SEQ ID NO: 2139530 - DNA, 15 bp, Homo sapiens
tggctcaactagatt

SEQ ID NO: 2139531 - DNA, 15 bp, Homo sapiens
ggctcaactagattc

SEQ ID NO: 2139532 - DNA, 15 bp, Homo sapiens
gctcaactagattct

SEQ ID NO: 2139533 - DNA, 15 bp, Homo sapiens
ctcaactagattctg

SEQ ID NO: 2139534 - DNA, 15 bp, Homo sapiens
tcaactagattctga

SEQ ID NO: 2139535 - DNA, 15 bp, Homo sapiens
caactagattctgag

SEQ ID NO: 2139536 - DNA, 15 bp, Homo sapiens
aactagattctgaga

SEQ ID NO: 2139537 - DNA, 15 bp, Homo sapiens
actagattctgagaa

SEQ ID NO: 2139538 - DNA, 15 bp, Homo sapiens
ctagattctgagaaa

SEQ ID NO: 2139539 - DNA, 15 bp, Homo sapiens
tagattctgagaaaa

SEQ ID NO: 2139540 - DNA, 15 bp, Homo sapiens
agattctgagaaaag

SEQ ID NO: 2139541 - DNA, 15 bp, Homo sapiens
gattctgagaaaagg

SEQ ID NO: 2139542 - DNA, 15 bp, Homo sapiens
attctgagaaaaggg

SEQ ID NO: 2139543 - DNA, 15 bp, Homo sapiens
ttctgagaaaaggga

SEQ ID NO: 2139544 - DNA, 15 bp, Homo sapiens
tctgagaaaagggac

SEQ ID NO: 2139545 - DNA, 15 bp, Homo sapiens
ctgagaaaagggact

SEQ ID NO: 2139546 - DNA, 15 bp, Homo sapiens
tgagaaaagggactt

SEQ ID NO: 2139547 - DNA, 15 bp, Homo sapiens
gagaaaagggacttt

SEQ ID NO: 2139548 - DNA, 15 bp, Homo sapiens
agaaaagggactttc

SEQ ID NO: 2139549 - DNA, 15 bp, Homo sapiens
gaaaagggactttct

SEQ ID NO: 2139550 - DNA, 15 bp, Homo sapiens
aaaagggactttctg

SEQ ID NO: 2139551 - DNA, 15 bp, Homo sapiens
aaagggactttctgt

SEQ ID NO: 2139552 - DNA, 15 bp, Homo sapiens
aagggactttctgta

SEQ ID NO: 2139553 - DNA, 15 bp, Homo sapiens
agggactttctgtaa

SEQ ID NO: 2139554 - DNA, 15 bp, Homo sapiens
gggactttctgtaaa

SEQ ID NO: 2139555 - DNA, 15 bp, Homo sapiens
ggactttctgtaaag

SEQ ID NO: 2139556 - DNA, 15 bp, Homo sapiens
gactttctgtaaagg

SEQ ID NO: 2139557 - DNA, 15 bp, Homo sapiens
actttctgtaaaggc

SEQ ID NO: 2139558 - DNA, 15 bp, Homo sapiens
ctttctgtaaaggct

SEQ ID NO: 2139559 - DNA, 15 bp, Homo sapiens
tttctgtaaaggctg

SEQ ID NO: 2139560 - DNA, 15 bp, Homo sapiens
ttctgtaaaggctgc

SEQ ID NO: 2139561 - DNA, 15 bp, Homo sapiens
tctgtaaaggctgct

SEQ ID NO: 2139562 - DNA, 15 bp, Homo sapiens
ctgtaaaggctgcta

SEQ ID NO: 2139563 - DNA, 15 bp, Homo sapiens
tgtaaaggctgctac

SEQ ID NO: 2139564 - DNA, 15 bp, Homo sapiens
gtaaaggctgctacc

SEQ ID NO: 2139565 - DNA, 15 bp, Homo sapiens
taaaggctgctacct

SEQ ID NO: 2139566 - DNA, 15 bp, Homo sapiens
aaaggctgctacctg

SEQ ID NO: 2139567 - DNA, 15 bp, Homo sapiens
aaggctgctacctgg

SEQ ID NO: 2139568 - DNA, 15 bp, Homo sapiens
aggctgctacctggt

SEQ ID NO: 2139569 - DNA, 15 bp, Homo sapiens
ggctgctacctggtc

SEQ ID NO: 2139570 - DNA, 15 bp, Homo sapiens
gctgctacctggtct

SEQ ID NO: 2139571 - DNA, 15 bp, Homo sapiens
ctgctacctggtctt

SEQ ID NO: 2139572 - DNA, 15 bp, Homo sapiens
tgctacctggtcttt

SEQ ID NO: 2139573 - DNA, 15 bp, Homo sapiens
gctacctggtctttg

SEQ ID NO: 2139574 - DNA, 15 bp, Homo sapiens
ctacctggtctttga

SEQ ID NO: 2139575 - DNA, 15 bp, Homo sapiens
tacctggtctttgat

SEQ ID NO: 2139576 - DNA, 15 bp, Homo sapiens
acctggtctttgata

SEQ ID NO: 2139577 - DNA, 15 bp, Homo sapiens
cctggtctttgatac

SEQ ID NO: 2139578 - DNA, 15 bp, Homo sapiens
ctggtctttgataca

SEQ ID NO: 2139579 - DNA, 15 bp, Homo sapiens
tggtctttgatacag

SEQ ID NO: 2139580 - DNA, 15 bp, Homo sapiens
ggtctttgatacagc

SEQ ID NO: 2139581 - DNA, 15 bp, Homo sapiens
gtctttgatacagca

SEQ ID NO: 2139582 - DNA, 15 bp, Homo sapiens
tctttgatacagcaa

SEQ ID NO: 2139583 - DNA, 15 bp, Homo sapiens
ctttgatacagcaac

SEQ ID NO: 2139584 - DNA, 15 bp, Homo sapiens
tttgatacagcaact

SEQ ID NO: 2139585 - DNA, 15 bp, Homo sapiens
ttgatacagcaacta

SEQ ID NO: 2139586 - DNA, 15 bp, Homo sapiens
tgatacagcaactag

SEQ ID NO: 2139587 - DNA, 15 bp, Homo sapiens
gatacagcaactaga

SEQ ID NO: 2139588 - DNA, 15 bp, Homo sapiens
atacagcaactagac

SEQ ID NO: 2139589 - DNA, 15 bp, Homo sapiens
tacagcaactagaca

SEQ ID NO: 2139590 - DNA, 15 bp, Homo sapiens
acagcaactagacat

SEQ ID NO: 2139591 - DNA, 15 bp, Homo sapiens
cagcaactagacatg

SEQ ID NO: 2139592 - DNA, 15 bp, Homo sapiens
agcaactagacatgt

SEQ ID NO: 2139593 - DNA, 15 bp, Homo sapiens
gcaactagacatgta

SEQ ID NO: 2139594 - DNA, 15 bp, Homo sapiens
caactagacatgtat

SEQ ID NO: 2139595 - DNA, 15 bp, Homo sapiens
aactagacatgtatt

SEQ ID NO: 2139596 - DNA, 15 bp, Homo sapiens
actagacatgtattt

SEQ ID NO: 2139597 - DNA, 15 bp, Homo sapiens
ctagacatgtatttt

SEQ ID NO: 2139598 - DNA, 15 bp, Homo sapiens
tagacatgtattttg

SEQ ID NO: 2139599 - DNA, 15 bp, Homo sapiens
agacatgtattttgg

SEQ ID NO: 2139600 - DNA, 15 bp, Homo sapiens
gacatgtattttggg

SEQ ID NO: 2139601 - DNA, 15 bp, Homo sapiens
acatgtattttgggg

SEQ ID NO: 2139602 - DNA, 15 bp, Homo sapiens
catgtattttggggt

SEQ ID NO: 2139603 - DNA, 15 bp, Homo sapiens
atgtattttggggtt

SEQ ID NO: 2139604 - DNA, 15 bp, Homo sapiens
tgtattttggggttc

SEQ ID NO: 2139605 - DNA, 15 bp, Homo sapiens
gtattttggggttct

SEQ ID NO: 2139606 - DNA, 15 bp, Homo sapiens
tattttggggttcta

SEQ ID NO: 2139607 - DNA, 15 bp, Homo sapiens
attttggggttctaa

SEQ ID NO: 2139608 - DNA, 15 bp, Homo sapiens
ttttggggttctaag

SEQ ID NO: 2139609 - DNA, 15 bp, Homo sapiens
tttggggttctaaga

SEQ ID NO: 2139610 - DNA, 15 bp, Homo sapiens
ttggggttctaagat

SEQ ID NO: 2139611 - DNA, 15 bp, Homo sapiens
tggggttctaagata

SEQ ID NO: 2139612 - DNA, 15 bp, Homo sapiens
ggggttctaagataa

SEQ ID NO: 2139613 - DNA, 15 bp, Homo sapiens
gggttctaagataag

SEQ ID NO: 2139614 - DNA, 15 bp, Homo sapiens
ggttctaagataagg

SEQ ID NO: 2139615 - DNA, 15 bp, Homo sapiens
gttctaagataaggt

SEQ ID NO: 2139616 - DNA, 15 bp, Homo sapiens
ttctaagataaggtt

SEQ ID NO: 2139617 - DNA, 15 bp, Homo sapiens
tctaagataaggttt

SEQ ID NO: 2139618 - DNA, 15 bp, Homo sapiens
ctaagataaggtttt

SEQ ID NO: 2139619 - DNA, 15 bp, Homo sapiens
taagataaggttttt

SEQ ID NO: 2139620 - DNA, 15 bp, Homo sapiens
aagataaggtttttg

SEQ ID NO: 2139621 - DNA, 15 bp, Homo sapiens
agataaggtttttgg

SEQ ID NO: 2139622 - DNA, 15 bp, Homo sapiens
gataaggtttttggc

SEQ ID NO: 2139623 - DNA, 15 bp, Homo sapiens
ataaggtttttggct

SEQ ID NO: 2139624 - DNA, 15 bp, Homo sapiens
taaggtttttggctc

SEQ ID NO: 2139625 - DNA, 15 bp, Homo sapiens
aaggtttttggctct

SEQ ID NO: 2139626 - DNA, 15 bp, Homo sapiens
aggtttttggctctg

SEQ ID NO: 2139627 - DNA, 15 bp, Homo sapiens
ggtttttggctctga

SEQ ID NO: 2139628 - DNA, 15 bp, Homo sapiens
gtttttggctctgag

SEQ ID NO: 2139629 - DNA, 15 bp, Homo sapiens
tttttggctctgagc

SEQ ID NO: 2139630 - DNA, 15 bp, Homo sapiens
ttttggctctgagca

SEQ ID NO: 2139631 - DNA, 15 bp, Homo sapiens
tttggctctgagcag

SEQ ID NO: 2139632 - DNA, 15 bp, Homo sapiens
tggctctgagcagca

SEQ ID NO: 2139633 - DNA, 15 bp, Homo sapiens
ggctctgagcagcag

SEQ ID NO: 2139634 - DNA, 15 bp, Homo sapiens
tctgagcagcagaga

SEQ ID NO: 2139635 - DNA, 15 bp, Homo sapiens
ctgagcagcagagag

SEQ ID NO: 2139636 - DNA, 15 bp, Homo sapiens
tgagcagcagagagc

SEQ ID NO: 2139637 - DNA, 15 bp, Homo sapiens
gagcagcagagagct

SEQ ID NO: 2139638 - DNA, 15 bp, Homo sapiens
agcagcagagagctg

SEQ ID NO: 2139639 - DNA, 15 bp, Homo sapiens
gcagcagagagctga

SEQ ID NO: 2139640 - DNA, 15 bp, Homo sapiens
cagcagagagctgag

SEQ ID NO: 2139641 - DNA, 15 bp, Homo sapiens
agcagagagctgaga

SEQ ID NO: 2139642 - DNA, 15 bp, Homo sapiens
gcagagagctgagaa

SEQ ID NO: 2139643 - DNA, 15 bp, Homo sapiens
cagagagctgagaag

SEQ ID NO: 2139644 - DNA, 15 bp, Homo sapiens
agagagctgagaagc

SEQ ID NO: 2139645 - DNA, 15 bp, Homo sapiens
gagagctgagaagca

SEQ ID NO: 2139646 - DNA, 15 bp, Homo sapiens
agagctgagaagcag

SEQ ID NO: 2139647 - DNA, 15 bp, Homo sapiens
gagctgagaagcagg

SEQ ID NO: 2139648 - DNA, 15 bp, Homo sapiens
agctgagaagcagga

SEQ ID NO: 2139649 - DNA, 15 bp, Homo sapiens
gctgagaagcaggac

SEQ ID NO: 2139650 - DNA, 15 bp, Homo sapiens
ctgagaagcaggaca

SEQ ID NO: 2139651 - DNA, 15 bp, Homo sapiens
tgagaagcaggacat

SEQ ID NO: 2139652 - DNA, 15 bp, Homo sapiens
gagaagcaggacatg

SEQ ID NO: 2139653 - DNA, 15 bp, Homo sapiens
agaagcaggacatga

SEQ ID NO: 2139654 - DNA, 15 bp, Homo sapiens
gaagcaggacatgaa

SEQ ID NO: 2139655 - DNA, 15 bp, Homo sapiens
aagcaggacatgaag

SEQ ID NO: 2139656 - DNA, 15 bp, Homo sapiens
agcaggacatgaaga

SEQ ID NO: 2139657 - DNA, 15 bp, Homo sapiens
gcaggacatgaagaa

SEQ ID NO: 2139658 - DNA, 15 bp, Homo sapiens
caggacatgaagaat

SEQ ID NO: 2139659 - DNA, 15 bp, Homo sapiens
aggacatgaagaatt

SEQ ID NO: 2139660 - DNA, 15 bp, Homo sapiens
ggacatgaagaattg

SEQ ID NO: 2139661 - DNA, 15 bp, Homo sapiens
gacatgaagaattgg

SEQ ID NO: 2139662 - DNA, 15 bp, Homo sapiens
acatgaagaattgga

SEQ ID NO: 2139663 - DNA, 15 bp, Homo sapiens
catgaagaattggac

SEQ ID NO: 2139664 - DNA, 15 bp, Homo sapiens
atgaagaattggact

SEQ ID NO: 2139665 - DNA, 15 bp, Homo sapiens
tgaagaattggactt

SEQ ID NO: 2139666 - DNA, 15 bp, Homo sapiens
gaagaattggactta

SEQ ID NO: 2139667 - DNA, 15 bp, Homo sapiens
aagaattggacttac

SEQ ID NO: 2139668 - DNA, 15 bp, Homo sapiens
agaattggacttacc

SEQ ID NO: 2139669 - DNA, 15 bp, Homo sapiens
gaattggacttacct

SEQ ID NO: 2139670 - DNA, 15 bp, Homo sapiens
aattggacttacctg

SEQ ID NO: 2139671 - DNA, 15 bp, Homo sapiens
attggacttacctga

SEQ ID NO: 2139672 - DNA, 15 bp, Homo sapiens
ttggacttacctgaa

SEQ ID NO: 2139673 - DNA, 15 bp, Homo sapiens
tggacttacctgaac

SEQ ID NO: 2139674 - DNA, 15 bp, Homo sapiens
ggacttacctgaact

SEQ ID NO: 2139675 - DNA, 15 bp, Homo sapiens
gacttacctgaacta

SEQ ID NO: 2139676 - DNA, 15 bp, Homo sapiens
acttacctgaactat

SEQ ID NO: 2139677 - DNA, 15 bp, Homo sapiens
cttacctgaactata

SEQ ID NO: 2139678 - DNA, 15 bp, Homo sapiens
ttacctgaactatag

SEQ ID NO: 2139679 - DNA, 15 bp, Homo sapiens
tacctgaactatagc

SEQ ID NO: 2139680 - DNA, 15 bp, Homo sapiens
acctgaactatagcc

SEQ ID NO: 2139681 - DNA, 15 bp, Homo sapiens
cctgaactatagcca

SEQ ID NO: 2139682 - DNA, 15 bp, Homo sapiens
ctgaactatagccaa

SEQ ID NO: 2139683 - DNA, 15 bp, Homo sapiens
tgaactatagccaaa

SEQ ID NO: 2139684 - DNA, 15 bp, Homo sapiens
gaactatagccaaat

SEQ ID NO: 2139685 - DNA, 15 bp, Homo sapiens
aactatagccaaatg

SEQ ID NO: 2139686 - DNA, 15 bp, Homo sapiens
actatagccaaatgg

SEQ ID NO: 2139687 - DNA, 15 bp, Homo sapiens
ctatagccaaatgga

SEQ ID NO: 2139688 - DNA, 15 bp, Homo sapiens
tatagccaaatggat

SEQ ID NO: 2139689 - DNA, 15 bp, Homo sapiens
atagccaaatggatg

SEQ ID NO: 2139690 - DNA, 15 bp, Homo sapiens
tagccaaatggatgt

SEQ ID NO: 2139691 - DNA, 15 bp, Homo sapiens
agccaaatggatgtg

SEQ ID NO: 2139692 - DNA, 15 bp, Homo sapiens
gccaaatggatgtga

SEQ ID NO: 2139693 - DNA, 15 bp, Homo sapiens
ccaaatggatgtgac

SEQ ID NO: 2139694 - DNA, 15 bp, Homo sapiens
caaatggatgtgacc

SEQ ID NO: 2139695 - DNA, 15 bp, Homo sapiens
aaatggatgtgaccg

SEQ ID NO: 2139696 - DNA, 15 bp, Homo sapiens
aatggatgtgaccgc

SEQ ID NO: 2139697 - DNA, 15 bp, Homo sapiens
atggatgtgaccgct

SEQ ID NO: 2139698 - DNA, 15 bp, Homo sapiens
tggatgtgaccgcta

SEQ ID NO: 2139699 - DNA, 15 bp, Homo sapiens
ggatgtgaccgctaa

SEQ ID NO: 2139700 - DNA, 15 bp, Homo sapiens
gatgtgaccgctaat

SEQ ID NO: 2139701 - DNA, 15 bp, Homo sapiens
atgtgaccgctaatt

SEQ ID NO: 2139702 - DNA, 15 bp, Homo sapiens
tgtgaccgctaattg

SEQ ID NO: 2139703 - DNA, 15 bp, Homo sapiens
gtgaccgctaattgt

SEQ ID NO: 2139704 - DNA, 15 bp, Homo sapiens
tgaccgctaattgta

SEQ ID NO: 2139705 - DNA, 15 bp, Homo sapiens
gaccgctaattgtag

SEQ ID NO: 2139706 - DNA, 15 bp, Homo sapiens
accgctaattgtaga

SEQ ID NO: 2139707 - DNA, 15 bp, Homo sapiens
ccgctaattgtagat

SEQ ID NO: 2139708 - DNA, 15 bp, Homo sapiens
cgctaattgtagatg

SEQ ID NO: 2139709 - DNA, 15 bp, Homo sapiens
gctaattgtagatgg

SEQ ID NO: 2139710 - DNA, 15 bp, Homo sapiens
ctaattgtagatggc

SEQ ID NO: 2139711 - DNA, 15 bp, Homo sapiens
taattgtagatggca

SEQ ID NO: 2139712 - DNA, 15 bp, Homo sapiens
aattgtagatggcag

SEQ ID NO: 2139713 - DNA, 15 bp, Homo sapiens
attgtagatggcagg

SEQ ID NO: 2139714 - DNA, 15 bp, Homo sapiens
ttgtagatggcaggc

SEQ ID NO: 2139715 - DNA, 15 bp, Homo sapiens
tgtagatggcaggct

SEQ ID NO: 2139716 - DNA, 15 bp, Homo sapiens
gtagatggcaggctg

SEQ ID NO: 2139717 - DNA, 15 bp, Homo sapiens
tagatggcaggctgg

SEQ ID NO: 2139718 - DNA, 15 bp, Homo sapiens
agatggcaggctggc

SEQ ID NO: 2139719 - DNA, 15 bp, Homo sapiens
gatggcaggctggct

SEQ ID NO: 2139720 - DNA, 15 bp, Homo sapiens
atggcaggctggctt

SEQ ID NO: 2139721 - DNA, 15 bp, Homo sapiens
tggcaggctggcttt

SEQ ID NO: 2139722 - DNA, 15 bp, Homo sapiens
ggcaggctggctttt

SEQ ID NO: 2139723 - DNA, 15 bp, Homo sapiens
gcaggctggcttttg

SEQ ID NO: 2139724 - DNA, 15 bp, Homo sapiens
caggctggcttttga

SEQ ID NO: 2139725 - DNA, 15 bp, Homo sapiens
aggctggcttttgag

SEQ ID NO: 2139726 - DNA, 15 bp, Homo sapiens
ggctggcttttgaga

SEQ ID NO: 2139727 - DNA, 15 bp, Homo sapiens
gctggcttttgagag

SEQ ID NO: 2139728 - DNA, 15 bp, Homo sapiens
ctggcttttgagaga

SEQ ID NO: 2139729 - DNA, 15 bp, Homo sapiens
tggcttttgagagaa

SEQ ID NO: 2139730 - DNA, 15 bp, Homo sapiens
ggcttttgagagaac

SEQ ID NO: 2139731 - DNA, 15 bp, Homo sapiens
gcttttgagagaacc

SEQ ID NO: 2139732 - DNA, 15 bp, Homo sapiens
cttttgagagaaccc

SEQ ID NO: 2139733 - DNA, 15 bp, Homo sapiens
ttttgagagaaccca

SEQ ID NO: 2139734 - DNA, 15 bp, Homo sapiens
tttgagagaacccag

SEQ ID NO: 2139735 - DNA, 15 bp, Homo sapiens
ttgagagaacccaga

SEQ ID NO: 2139736 - DNA, 15 bp, Homo sapiens
tgagagaacccagaa

SEQ ID NO: 2139737 - DNA, 15 bp, Homo sapiens
gagagaacccagaat

SEQ ID NO: 2139738 - DNA, 15 bp, Homo sapiens
agagaacccagaatg

SEQ ID NO: 2139739 - DNA, 15 bp, Homo sapiens
gagaacccagaatga

SEQ ID NO: 2139740 - DNA, 15 bp, Homo sapiens
agaacccagaatgaa

SEQ ID NO: 2139741 - DNA, 15 bp, Homo sapiens
gaacccagaatgaat

SEQ ID NO: 2139742 - DNA, 15 bp, Homo sapiens
aacccagaatgaata

SEQ ID NO: 2139743 - DNA, 15 bp, Homo sapiens
acccagaatgaatag

SEQ ID NO: 2139744 - DNA, 15 bp, Homo sapiens
cccagaatgaatagt

SEQ ID NO: 2139745 - DNA, 15 bp, Homo sapiens
ccagaatgaatagta

SEQ ID NO: 2139746 - DNA, 15 bp, Homo sapiens
cagaatgaatagtaa

SEQ ID NO: 2139747 - DNA, 15 bp, Homo sapiens
agaatgaatagtaaa

SEQ ID NO: 2139748 - DNA, 15 bp, Homo sapiens
gaatgaatagtaaat

SEQ ID NO: 2139749 - DNA, 15 bp, Homo sapiens
aatgaatagtaaatc

SEQ ID NO: 2139750 - DNA, 15 bp, Homo sapiens
atgaatagtaaatct

SEQ ID NO: 2139751 - DNA, 15 bp, Homo sapiens
tgaatagtaaatctc

SEQ ID NO: 2139752 - DNA, 15 bp, Homo sapiens
gaatagtaaatctca

SEQ ID NO: 2139753 - DNA, 15 bp, Homo sapiens
aatagtaaatctcat

SEQ ID NO: 2139754 - DNA, 15 bp, Homo sapiens
atagtaaatctcatt

SEQ ID NO: 2139755 - DNA, 15 bp, Homo sapiens
tagtaaatctcattt

SEQ ID NO: 2139756 - DNA, 15 bp, Homo sapiens
agtaaatctcatttt

SEQ ID NO: 2139757 - DNA, 15 bp, Homo sapiens
gtaaatctcattttc

SEQ ID NO: 2139758 - DNA, 15 bp, Homo sapiens
taaatctcattttca

SEQ ID NO: 2139759 - DNA, 15 bp, Homo sapiens
aaatctcattttcag

SEQ ID NO: 2139760 - DNA, 15 bp, Homo sapiens
aatctcattttcagc

SEQ ID NO: 2139761 - DNA, 15 bp, Homo sapiens
atctcattttcagca

SEQ ID NO: 2139762 - DNA, 15 bp, Homo sapiens
tctcattttcagcag

SEQ ID NO: 2139763 - DNA, 15 bp, Homo sapiens
ctcattttcagcaga

SEQ ID NO: 2139764 - DNA, 15 bp, Homo sapiens
tcattttcagcagaa

SEQ ID NO: 2139765 - DNA, 15 bp, Homo sapiens
cattttcagcagaag

SEQ ID NO: 2139766 - DNA, 15 bp, Homo sapiens
attttcagcagaaga

SEQ ID NO: 2139767 - DNA, 15 bp, Homo sapiens
ttttcagcagaagag

SEQ ID NO: 2139768 - DNA, 15 bp, Homo sapiens
tttcagcagaagaga

SEQ ID NO: 2139769 - DNA, 15 bp, Homo sapiens
ttcagcagaagagag

SEQ ID NO: 2139770 - DNA, 15 bp, Homo sapiens
tcagcagaagagagt

SEQ ID NO: 2139771 - DNA, 15 bp, Homo sapiens
cagcagaagagagtc

SEQ ID NO: 2139772 - DNA, 15 bp, Homo sapiens
agcagaagagagtct

SEQ ID NO: 2139773 - DNA, 15 bp, Homo sapiens
gcagaagagagtctg

SEQ ID NO: 2139774 - DNA, 15 bp, Homo sapiens
cagaagagagtctgc

SEQ ID NO: 2139775 - DNA, 15 bp, Homo sapiens
agaagagagtctgct

SEQ ID NO: 2139776 - DNA, 15 bp, Homo sapiens
gaagagagtctgcta

SEQ ID NO: 2139777 - DNA, 15 bp, Homo sapiens
aagagagtctgctat

SEQ ID NO: 2139778 - DNA, 15 bp, Homo sapiens
agagagtctgctatg

SEQ ID NO: 2139779 - DNA, 15 bp, Homo sapiens
gagagtctgctatga

SEQ ID NO: 2139780 - DNA, 15 bp, Homo sapiens
agagtctgctatgag

SEQ ID NO: 2139781 - DNA, 15 bp, Homo sapiens
gagtctgctatgagg

SEQ ID NO: 2139782 - DNA, 15 bp, Homo sapiens
agtctgctatgaggt

SEQ ID NO: 2139783 - DNA, 15 bp, Homo sapiens
gtctgctatgaggtt

SEQ ID NO: 2139784 - DNA, 15 bp, Homo sapiens
tctgctatgaggttc

SEQ ID NO: 2139785 - DNA, 15 bp, Homo sapiens
ctgctatgaggttca

SEQ ID NO: 2139786 - DNA, 15 bp, Homo sapiens
tgctatgaggttcac

SEQ ID NO: 2139787 - DNA, 15 bp, Homo sapiens
gctatgaggttcaca

SEQ ID NO: 2139788 - DNA, 15 bp, Homo sapiens
ctatgaggttcacag

SEQ ID NO: 2139789 - DNA, 15 bp, Homo sapiens
tatgaggttcacaga

SEQ ID NO: 2139790 - DNA, 15 bp, Homo sapiens
atgaggttcacagaa

SEQ ID NO: 2139791 - DNA, 15 bp, Homo sapiens
tgaggttcacagaaa

SEQ ID NO: 2139792 - DNA, 15 bp, Homo sapiens
gaggttcacagaaaa

SEQ ID NO: 2139793 - DNA, 15 bp, Homo sapiens
aggttcacagaaaat

SEQ ID NO: 2139794 - DNA, 15 bp, Homo sapiens
ggttcacagaaaata

SEQ ID NO: 2139795 - DNA, 15 bp, Homo sapiens
gttcacagaaaatag

SEQ ID NO: 2139796 - DNA, 15 bp, Homo sapiens
ttcacagaaaatagc

SEQ ID NO: 2139797 - DNA, 15 bp, Homo sapiens
tcacagaaaatagct

SEQ ID NO: 2139798 - DNA, 15 bp, Homo sapiens
cacagaaaatagctc

SEQ ID NO: 2139799 - DNA, 15 bp, Homo sapiens
acagaaaatagctct

SEQ ID NO: 2139800 - DNA, 15 bp, Homo sapiens
cagaaaatagctcta

SEQ ID NO: 2139801 - DNA, 15 bp, Homo sapiens
agaaaatagctctag

SEQ ID NO: 2139802 - DNA, 15 bp, Homo sapiens
gaaaatagctctagt

SEQ ID NO: 2139803 - DNA, 15 bp, Homo sapiens
aaaatagctctagta

SEQ ID NO: 2139804 - DNA, 15 bp, Homo sapiens
aaatagctctagtaa

SEQ ID NO: 2139805 - DNA, 15 bp, Homo sapiens
aatagctctagtaac

SEQ ID NO: 2139806 - DNA, 15 bp, Homo sapiens
atagctctagtaaca

SEQ ID NO: 2139807 - DNA, 15 bp, Homo sapiens
tagctctagtaacaa

SEQ ID NO: 2139808 - DNA, 15 bp, Homo sapiens
agctctagtaacaac

SEQ ID NO: 2139809 - DNA, 15 bp, Homo sapiens
gctctagtaacaaca

SEQ ID NO: 2139810 - DNA, 15 bp, Homo sapiens
ctctagtaacaacag

SEQ ID NO: 2139811 - DNA, 15 bp, Homo sapiens
tctagtaacaacagc

SEQ ID NO: 2139812 - DNA, 15 bp, Homo sapiens
ctagtaacaacagcc

SEQ ID NO: 2139813 - DNA, 15 bp, Homo sapiens
tagtaacaacagccc

SEQ ID NO: 2139814 - DNA, 15 bp, Homo sapiens
agtaacaacagcccc

SEQ ID NO: 2139815 - DNA, 15 bp, Homo sapiens
gtaacaacagcccca

SEQ ID NO: 2139816 - DNA, 15 bp, Homo sapiens
taacaacagccccat

SEQ ID NO: 2139817 - DNA, 15 bp, Homo sapiens
aacaacagccccatt

SEQ ID NO: 2139818 - DNA, 15 bp, Homo sapiens
acaacagccccattg

SEQ ID NO: 2139819 - DNA, 15 bp, Homo sapiens
caacagccccattgg

SEQ ID NO: 2139820 - DNA, 15 bp, Homo sapiens
aacagccccattggg

SEQ ID NO: 2139821 - DNA, 15 bp, Homo sapiens
acagccccattgggc

SEQ ID NO: 2139822 - DNA, 15 bp, Homo sapiens
cagccccattgggca

SEQ ID NO: 2139823 - DNA, 15 bp, Homo sapiens
agccccattgggcac

SEQ ID NO: 2139824 - DNA, 15 bp, Homo sapiens
gccccattgggcact

SEQ ID NO: 2139825 - DNA, 15 bp, Homo sapiens
ccccattgggcacta

SEQ ID NO: 2139826 - DNA, 15 bp, Homo sapiens
cccattgggcactag

SEQ ID NO: 2139827 - DNA, 15 bp, Homo sapiens
ccattgggcactaga

SEQ ID NO: 2139828 - DNA, 15 bp, Homo sapiens
cattgggcactagat

SEQ ID NO: 2139829 - DNA, 15 bp, Homo sapiens
attgggcactagatt

SEQ ID NO: 2139830 - DNA, 15 bp, Homo sapiens
ttgggcactagattg

SEQ ID NO: 2139831 - DNA, 15 bp, Homo sapiens
tgggcactagattgg

SEQ ID NO: 2139832 - DNA, 15 bp, Homo sapiens
gggcactagattgga

SEQ ID NO: 2139833 - DNA, 15 bp, Homo sapiens
ggcactagattggat

SEQ ID NO: 2139834 - DNA, 15 bp, Homo sapiens
gcactagattggata

SEQ ID NO: 2139835 - DNA, 15 bp, Homo sapiens
cactagattggatac

SEQ ID NO: 2139836 - DNA, 15 bp, Homo sapiens
actagattggatacc

SEQ ID NO: 2139837 - DNA, 15 bp, Homo sapiens
ctagattggatacca

SEQ ID NO: 2139838 - DNA, 15 bp, Homo sapiens
tagattggataccag

SEQ ID NO: 2139839 - DNA, 15 bp, Homo sapiens
agattggataccagt

SEQ ID NO: 2139840 - DNA, 15 bp, Homo sapiens
gattggataccagtt

SEQ ID NO: 2139841 - DNA, 15 bp, Homo sapiens
attggataccagttc

SEQ ID NO: 2139842 - DNA, 15 bp, Homo sapiens
ttggataccagttcc

SEQ ID NO: 2139843 - DNA, 15 bp, Homo sapiens
tggataccagttccc

SEQ ID NO: 2139844 - DNA, 15 bp, Homo sapiens
ggataccagttccca

SEQ ID NO: 2139845 - DNA, 15 bp, Homo sapiens
gataccagttcccat

SEQ ID NO: 2139846 - DNA, 15 bp, Homo sapiens
ataccagttcccata

SEQ ID NO: 2139847 - DNA, 15 bp, Homo sapiens
taccagttcccatag

SEQ ID NO: 2139848 - DNA, 15 bp, Homo sapiens
accagttcccatagg

SEQ ID NO: 2139849 - DNA, 15 bp, Homo sapiens
ccagttcccataggt

SEQ ID NO: 2139850 - DNA, 15 bp, Homo sapiens
cagttcccataggta

SEQ ID NO: 2139851 - DNA, 15 bp, Homo sapiens
agttcccataggtaa

SEQ ID NO: 2139852 - DNA, 15 bp, Homo sapiens
gttcccataggtaaa

SEQ ID NO: 2139853 - DNA, 15 bp, Homo sapiens
ttcccataggtaaaa

SEQ ID NO: 2139854 - DNA, 15 bp, Homo sapiens
tcccataggtaaaac

SEQ ID NO: 2139855 - DNA, 15 bp, Homo sapiens
cccataggtaaaaca

SEQ ID NO: 2139856 - DNA, 15 bp, Homo sapiens
ccataggtaaaacaa

SEQ ID NO: 2139857 - DNA, 15 bp, Homo sapiens
cataggtaaaacaat

SEQ ID NO: 2139858 - DNA, 15 bp, Homo sapiens
ataggtaaaacaata

SEQ ID NO: 2139859 - DNA, 15 bp, Homo sapiens
taggtaaaacaataa

SEQ ID NO: 2139860 - DNA, 15 bp, Homo sapiens
aggtaaaacaataat

SEQ ID NO: 2139861 - DNA, 15 bp, Homo sapiens
ggtaaaacaataata

SEQ ID NO: 2139862 - DNA, 15 bp, Homo sapiens
gtaaaacaataatat

SEQ ID NO: 2139863 - DNA, 15 bp, Homo sapiens
taaaacaataatatt

SEQ ID NO: 2139864 - DNA, 15 bp, Homo sapiens
aaaacaataatatta

SEQ ID NO: 2139865 - DNA, 15 bp, Homo sapiens
aaacaataatattag

SEQ ID NO: 2139866 - DNA, 15 bp, Homo sapiens
aacaataatattagc

SEQ ID NO: 2139867 - DNA, 15 bp, Homo sapiens
acaataatattagct

SEQ ID NO: 2139868 - DNA, 15 bp, Homo sapiens
caataatattagcta

SEQ ID NO: 2139869 - DNA, 15 bp, Homo sapiens
aataatattagctat

SEQ ID NO: 2139870 - DNA, 15 bp, Homo sapiens
ataatattagctatt

SEQ ID NO: 2139871 - DNA, 15 bp, Homo sapiens
taatattagctattc

SEQ ID NO: 2139872 - DNA, 15 bp, Homo sapiens
aatattagctattct

SEQ ID NO: 2139873 - DNA, 15 bp, Homo sapiens
atattagctattctg

SEQ ID NO: 2139874 - DNA, 15 bp, Homo sapiens
tattagctattctgc

SEQ ID NO: 2139875 - DNA, 15 bp, Homo sapiens
attagctattctgca

SEQ ID NO: 2139876 - DNA, 15 bp, Homo sapiens
ttagctattctgcaa

SEQ ID NO: 2139877 - DNA, 15 bp, Homo sapiens
tagctattctgcaaa

SEQ ID NO: 2139878 - DNA, 15 bp, Homo sapiens
agctattctgcaaac

SEQ ID NO: 2139879 - DNA, 15 bp, Homo sapiens
gctattctgcaaacg

SEQ ID NO: 2139880 - DNA, 15 bp, Homo sapiens
ctattctgcaaacgc

SEQ ID NO: 2139881 - DNA, 15 bp, Homo sapiens
tattctgcaaacgca

SEQ ID NO: 2139882 - DNA, 15 bp, Homo sapiens
attctgcaaacgcaa

SEQ ID NO: 2139883 - DNA, 15 bp, Homo sapiens
ttctgcaaacgcaaa

SEQ ID NO: 2139884 - DNA, 15 bp, Homo sapiens
tctgcaaacgcaaag

SEQ ID NO: 2139885 - DNA, 15 bp, Homo sapiens
ctgcaaacgcaaagc

SEQ ID NO: 2139886 - DNA, 15 bp, Homo sapiens
tgcaaacgcaaagca

SEQ ID NO: 2139887 - DNA, 15 bp, Homo sapiens
gcaaacgcaaagcaa

SEQ ID NO: 2139888 - DNA, 15 bp, Homo sapiens
caaacgcaaagcaaa

SEQ ID NO: 2139889 - DNA, 15 bp, Homo sapiens
aaacgcaaagcaaaa

SEQ ID NO: 2139890 - DNA, 15 bp, Homo sapiens
aacgcaaagcaaaag

SEQ ID NO: 2139891 - DNA, 15 bp, Homo sapiens
acgcaaagcaaaagc

SEQ ID NO: 2139892 - DNA, 15 bp, Homo sapiens
cgcaaagcaaaagct

SEQ ID NO: 2139893 - DNA, 15 bp, Homo sapiens
gcaaagcaaaagcta

SEQ ID NO: 2139894 - DNA, 15 bp, Homo sapiens
caaagcaaaagctaa

SEQ ID NO: 2139895 - DNA, 15 bp, Homo sapiens
aaagcaaaagctaaa

SEQ ID NO: 2139896 - DNA, 15 bp, Homo sapiens
aagcaaaagctaaag

SEQ ID NO: 2139897 - DNA, 15 bp, Homo sapiens
agcaaaagctaaaga

SEQ ID NO: 2139898 - DNA, 15 bp, Homo sapiens
gcaaaagctaaagaa

SEQ ID NO: 2139899 - DNA, 15 bp, Homo sapiens
caaaagctaaagaaa

SEQ ID NO: 2139900 - DNA, 15 bp, Homo sapiens
aaaagctaaagaaaa

SEQ ID NO: 2139901 - DNA, 15 bp, Homo sapiens
aaagctaaagaaaat

SEQ ID NO: 2139902 - DNA, 15 bp, Homo sapiens
aagctaaagaaaatc

SEQ ID NO: 2139903 - DNA, 15 bp, Homo sapiens
agctaaagaaaatcg

SEQ ID NO: 2139904 - DNA, 15 bp, Homo sapiens
gctaaagaaaatcgc

SEQ ID NO: 2139905 - DNA, 15 bp, Homo sapiens
ctaaagaaaatcgct

SEQ ID NO: 2139906 - DNA, 15 bp, Homo sapiens
taaagaaaatcgcta

SEQ ID NO: 2139907 - DNA, 15 bp, Homo sapiens
aaagaaaatcgctaa

SEQ ID NO: 2139908 - DNA, 15 bp, Homo sapiens
aagaaaatcgctaac

SEQ ID NO: 2139909 - DNA, 15 bp, Homo sapiens
agaaaatcgctaacc

SEQ ID NO: 2139910 - DNA, 15 bp, Homo sapiens
gaaaatcgctaacca

SEQ ID NO: 2139911 - DNA, 15 bp, Homo sapiens
aaaatcgctaaccaa

SEQ ID NO: 2139912 - DNA, 15 bp, Homo sapiens
aaatcgctaaccaac

SEQ ID NO: 2139913 - DNA, 15 bp, Homo sapiens
aatcgctaaccaacc

SEQ ID NO: 2139914 - DNA, 15 bp, Homo sapiens
atcgctaaccaacca

SEQ ID NO: 2139915 - DNA, 15 bp, Homo sapiens
tcgctaaccaaccat

SEQ ID NO: 2139916 - DNA, 15 bp, Homo sapiens
cgctaaccaaccatg

SEQ ID NO: 2139917 - DNA, 15 bp, Homo sapiens
gctaaccaaccatga

SEQ ID NO: 2139918 - DNA, 15 bp, Homo sapiens
ctaaccaaccatgac

SEQ ID NO: 2139919 - DNA, 15 bp, Homo sapiens
taaccaaccatgact

SEQ ID NO: 2139920 - DNA, 15 bp, Homo sapiens
aaccaaccatgactt

SEQ ID NO: 2139921 - DNA, 15 bp, Homo sapiens
accaaccatgacttc

SEQ ID NO: 2139922 - DNA, 15 bp, Homo sapiens
ccaaccatgacttcc

SEQ ID NO: 2139923 - DNA, 15 bp, Homo sapiens
caaccatgacttccc

SEQ ID NO: 2139924 - DNA, 15 bp, Homo sapiens
aaccatgacttccct

SEQ ID NO: 2139925 - DNA, 15 bp, Homo sapiens
accatgacttccctt

SEQ ID NO: 2139926 - DNA, 15 bp, Homo sapiens
ccatgacttcccttt

SEQ ID NO: 2139927 - DNA, 15 bp, Homo sapiens
catgacttcccttta

SEQ ID NO: 2139928 - DNA, 15 bp, Homo sapiens
atgacttccctttaa

SEQ ID NO: 2139929 - DNA, 15 bp, Homo sapiens
tgacttccctttaaa

SEQ ID NO: 2139930 - DNA, 15 bp, Homo sapiens
gacttccctttaaaa

SEQ ID NO: 2139931 - DNA, 15 bp, Homo sapiens
acttccctttaaaat

SEQ ID NO: 2139932 - DNA, 15 bp, Homo sapiens
cttccctttaaaata

SEQ ID NO: 2139933 - DNA, 15 bp, Homo sapiens
ttccctttaaaatac

SEQ ID NO: 2139934 - DNA, 15 bp, Homo sapiens
tccctttaaaataca

SEQ ID NO: 2139935 - DNA, 15 bp, Homo sapiens
ccctttaaaatacag

SEQ ID NO: 2139936 - DNA, 15 bp, Homo sapiens
cctttaaaatacagt

SEQ ID NO: 2139937 - DNA, 15 bp, Homo sapiens
ctttaaaatacagtc

SEQ ID NO: 2139938 - DNA, 15 bp, Homo sapiens
tttaaaatacagtct

SEQ ID NO: 2139939 - DNA, 15 bp, Homo sapiens
ttaaaatacagtctg

SEQ ID NO: 2139940 - DNA, 15 bp, Homo sapiens
taaaatacagtctgg

SEQ ID NO: 2139941 - DNA, 15 bp, Homo sapiens
aaaatacagtctgga

SEQ ID NO: 2139942 - DNA, 15 bp, Homo sapiens
aaatacagtctggaa

SEQ ID NO: 2139943 - DNA, 15 bp, Homo sapiens
aatacagtctggaaa

SEQ ID NO: 2139944 - DNA, 15 bp, Homo sapiens
atacagtctggaaac

SEQ ID NO: 2139945 - DNA, 15 bp, Homo sapiens
tacagtctggaaaca

SEQ ID NO: 2139946 - DNA, 15 bp, Homo sapiens
acagtctggaaacag

SEQ ID NO: 2139947 - DNA, 15 bp, Homo sapiens
cagtctggaaacaga

SEQ ID NO: 2139948 - DNA, 15 bp, Homo sapiens
agtctggaaacagaa

SEQ ID NO: 2139949 - DNA, 15 bp, Homo sapiens
gtctggaaacagaag

SEQ ID NO: 2139950 - DNA, 15 bp, Homo sapiens
tctggaaacagaagt

SEQ ID NO: 2139951 - DNA, 15 bp, Homo sapiens
ctggaaacagaagtc

SEQ ID NO: 2139952 - DNA, 15 bp, Homo sapiens
tggaaacagaagtcc

SEQ ID NO: 2139953 - DNA, 15 bp, Homo sapiens
ggaaacagaagtccc

SEQ ID NO: 2139954 - DNA, 15 bp, Homo sapiens
gaaacagaagtccct

SEQ ID NO: 2139955 - DNA, 15 bp, Homo sapiens
aaacagaagtccctt

SEQ ID NO: 2139956 - DNA, 15 bp, Homo sapiens
aacagaagtcccttt

SEQ ID NO: 2139957 - DNA, 15 bp, Homo sapiens
acagaagtcccttta

SEQ ID NO: 2139958 - DNA, 15 bp, Homo sapiens
cagaagtccctttat

SEQ ID NO: 2139959 - DNA, 15 bp, Homo sapiens
agaagtccctttatt

SEQ ID NO: 2139960 - DNA, 15 bp, Homo sapiens
gaagtccctttattc

SEQ ID NO: 2139961 - DNA, 15 bp, Homo sapiens
aagtccctttattcc

SEQ ID NO: 2139962 - DNA, 15 bp, Homo sapiens
agtccctttattcct

SEQ ID NO: 2139963 - DNA, 15 bp, Homo sapiens
gtccctttattcctt

SEQ ID NO: 2139964 - DNA, 15 bp, Homo sapiens
tccctttattccttc

SEQ ID NO: 2139965 - DNA, 15 bp, Homo sapiens
ccctttattccttcc

SEQ ID NO: 2139966 - DNA, 15 bp, Homo sapiens
cctttattccttccc

SEQ ID NO: 2139967 - DNA, 15 bp, Homo sapiens
ctttattccttccct

SEQ ID NO: 2139968 - DNA, 15 bp, Homo sapiens
tttattccttccctt

SEQ ID NO: 2139969 - DNA, 15 bp, Homo sapiens
ttattccttcccttt

SEQ ID NO: 2139970 - DNA, 15 bp, Homo sapiens
tattccttccctttg

SEQ ID NO: 2139971 - DNA, 15 bp, Homo sapiens
attccttccctttga

SEQ ID NO: 2139972 - DNA, 15 bp, Homo sapiens
ttccttccctttgat

SEQ ID NO: 2139973 - DNA, 15 bp, Homo sapiens
tccttccctttgatt

SEQ ID NO: 2139974 - DNA, 15 bp, Homo sapiens
ccttccctttgattt

SEQ ID NO: 2139975 - DNA, 15 bp, Homo sapiens
cttccctttgatttc

SEQ ID NO: 2139976 - DNA, 15 bp, Homo sapiens
ttccctttgatttct

SEQ ID NO: 2139977 - DNA, 15 bp, Homo sapiens
tccctttgatttctt

SEQ ID NO: 2139978 - DNA, 15 bp, Homo sapiens
ccctttgatttcttg

SEQ ID NO: 2139979 - DNA, 15 bp, Homo sapiens
cctttgatttcttgc

SEQ ID NO: 2139980 - DNA, 15 bp, Homo sapiens
ctttgatttcttgcc

SEQ ID NO: 2139981 - DNA, 15 bp, Homo sapiens
tttgatttcttgccc

SEQ ID NO: 2139982 - DNA, 15 bp, Homo sapiens
ttgatttcttgccct

SEQ ID NO: 2139983 - DNA, 15 bp, Homo sapiens
tgatttcttgccctt

SEQ ID NO: 2139984 - DNA, 15 bp, Homo sapiens
gatttcttgcccttt

SEQ ID NO: 2139985 - DNA, 15 bp, Homo sapiens
atttcttgccctttt

SEQ ID NO: 2139986 - DNA, 15 bp, Homo sapiens
tttcttgcccttttc

SEQ ID NO: 2139987 - DNA, 15 bp, Homo sapiens
ttcttgcccttttcc

SEQ ID NO: 2139988 - DNA, 15 bp, Homo sapiens
tcttgcccttttcct

SEQ ID NO: 2139989 - DNA, 15 bp, Homo sapiens
cttgcccttttcctg

SEQ ID NO: 2139990 - DNA, 15 bp, Homo sapiens
ttgcccttttcctgc

SEQ ID NO: 2139991 - DNA, 15 bp, Homo sapiens
tgcccttttcctgca

SEQ ID NO: 2139992 - DNA, 15 bp, Homo sapiens
gcccttttcctgcat

SEQ ID NO: 2139993 - DNA, 15 bp, Homo sapiens
cccttttcctgcatt

SEQ ID NO: 2139994 - DNA, 15 bp, Homo sapiens
ccttttcctgcattg

SEQ ID NO: 2139995 - DNA, 15 bp, Homo sapiens
cttttcctgcattgc

SEQ ID NO: 2139996 - DNA, 15 bp, Homo sapiens
ttttcctgcattgct

SEQ ID NO: 2139997 - DNA, 15 bp, Homo sapiens
tttcctgcattgcta

SEQ ID NO: 2139998 - DNA, 15 bp, Homo sapiens
ttcctgcattgctag

SEQ ID NO: 2139999 - DNA, 15 bp, Homo sapiens
tcctgcattgctaga

SEQ ID NO: 2140000 - DNA, 15 bp, Homo sapiens
cctgcattgctagat

SEQ ID NO: 2140001 - DNA, 15 bp, Homo sapiens
ctgcattgctagata

SEQ ID NO: 2140002 - DNA, 15 bp, Homo sapiens
tgcattgctagataa

SEQ ID NO: 2140003 - DNA, 15 bp, Homo sapiens
gcattgctagataag

SEQ ID NO: 2140004 - DNA, 15 bp, Homo sapiens
cattgctagataagg

SEQ ID NO: 2140005 - DNA, 15 bp, Homo sapiens
attgctagataagga

SEQ ID NO: 2140006 - DNA, 15 bp, Homo sapiens
ttgctagataaggaa

SEQ ID NO: 2140007 - DNA, 15 bp, Homo sapiens
tgctagataaggaat

SEQ ID NO: 2140008 - DNA, 15 bp, Homo sapiens
gctagataaggaatg

SEQ ID NO: 2140009 - DNA, 15 bp, Homo sapiens
ctagataaggaatgc

SEQ ID NO: 2140010 - DNA, 15 bp, Homo sapiens
tagataaggaatgca

SEQ ID NO: 2140011 - DNA, 15 bp, Homo sapiens
agataaggaatgcaa

SEQ ID NO: 2140012 - DNA, 15 bp, Homo sapiens
gataaggaatgcaat

SEQ ID NO: 2140013 - DNA, 15 bp, Homo sapiens
ataaggaatgcaatg

SEQ ID NO: 2140014 - DNA, 15 bp, Homo sapiens
taaggaatgcaatgg

SEQ ID NO: 2140015 - DNA, 15 bp, Homo sapiens
aaggaatgcaatggc

SEQ ID NO: 2140016 - DNA, 15 bp, Homo sapiens
aggaatgcaatggcc

SEQ ID NO: 2140017 - DNA, 15 bp, Homo sapiens
ggaatgcaatggcca

SEQ ID NO: 2140018 - DNA, 15 bp, Homo sapiens
gaatgcaatggccag

SEQ ID NO: 2140019 - DNA, 15 bp, Homo sapiens
aatgcaatggccaga

SEQ ID NO: 2140020 - DNA, 15 bp, Homo sapiens
atgcaatggccagaa

SEQ ID NO: 2140021 - DNA, 15 bp, Homo sapiens
tgcaatggccagaag

SEQ ID NO: 2140022 - DNA, 15 bp, Homo sapiens
gcaatggccagaagg

SEQ ID NO: 2140023 - DNA, 15 bp, Homo sapiens
caatggccagaagga

SEQ ID NO: 2140024 - DNA, 15 bp, Homo sapiens
aatggccagaaggaa

SEQ ID NO: 2140025 - DNA, 15 bp, Homo sapiens
atggccagaaggaag

SEQ ID NO: 2140026 - DNA, 15 bp, Homo sapiens
tggccagaaggaagg

SEQ ID NO: 2140027 - DNA, 15 bp, Homo sapiens
ggccagaaggaaggg

SEQ ID NO: 2140028 - DNA, 15 bp, Homo sapiens
ccagaaggaagggtg

SEQ ID NO: 2140029 - DNA, 15 bp, Homo sapiens
cagaaggaagggtgg

SEQ ID NO: 2140030 - DNA, 15 bp, Homo sapiens
agaaggaagggtgga

SEQ ID NO: 2140031 - DNA, 15 bp, Homo sapiens
gaaggaagggtggat

SEQ ID NO: 2140032 - DNA, 15 bp, Homo sapiens
aaggaagggtggata

SEQ ID NO: 2140033 - DNA, 15 bp, Homo sapiens
aggaagggtggataa

SEQ ID NO: 2140034 - DNA, 15 bp, Homo sapiens
ggaagggtggataat

SEQ ID NO: 2140035 - DNA, 15 bp, Homo sapiens
gaagggtggataatc

SEQ ID NO: 2140036 - DNA, 15 bp, Homo sapiens
aagggtggataatct

SEQ ID NO: 2140037 - DNA, 15 bp, Homo sapiens
agggtggataatcta

SEQ ID NO: 2140038 - DNA, 15 bp, Homo sapiens
gggtggataatctaa

SEQ ID NO: 2140039 - DNA, 15 bp, Homo sapiens
ggtggataatctaaa

SEQ ID NO: 2140040 - DNA, 15 bp, Homo sapiens
gtggataatctaaat

SEQ ID NO: 2140041 - DNA, 15 bp, Homo sapiens
tggataatctaaatt

SEQ ID NO: 2140042 - DNA, 15 bp, Homo sapiens
ggataatctaaatta

SEQ ID NO: 2140043 - DNA, 15 bp, Homo sapiens
gataatctaaattaa

SEQ ID NO: 2140044 - DNA, 15 bp, Homo sapiens
ataatctaaattaag

SEQ ID NO: 2140045 - DNA, 15 bp, Homo sapiens
taatctaaattaagt

SEQ ID NO: 2140046 - DNA, 15 bp, Homo sapiens
aatctaaattaagta

SEQ ID NO: 2140047 - DNA, 15 bp, Homo sapiens
atctaaattaagtag

SEQ ID NO: 2140048 - DNA, 15 bp, Homo sapiens
tctaaattaagtagc

SEQ ID NO: 2140049 - DNA, 15 bp, Homo sapiens
ctaaattaagtagcg

SEQ ID NO: 2140050 - DNA, 15 bp, Homo sapiens
taaattaagtagcga

SEQ ID NO: 2140051 - DNA, 15 bp, Homo sapiens
aaattaagtagcgaa

SEQ ID NO: 2140052 - DNA, 15 bp, Homo sapiens
aattaagtagcgaat

SEQ ID NO: 2140053 - DNA, 15 bp, Homo sapiens
attaagtagcgaata

SEQ ID NO: 2140054 - DNA, 15 bp, Homo sapiens
ttaagtagcgaatat

SEQ ID NO: 2140055 - DNA, 15 bp, Homo sapiens
taagtagcgaatatt

SEQ ID NO: 2140056 - DNA, 15 bp, Homo sapiens
aagtagcgaatatta

SEQ ID NO: 2140057 - DNA, 15 bp, Homo sapiens
agtagcgaatattag

SEQ ID NO: 2140058 - DNA, 15 bp, Homo sapiens
gtagcgaatattaga

SEQ ID NO: 2140059 - DNA, 15 bp, Homo sapiens
tagcgaatattagag

SEQ ID NO: 2140060 - DNA, 15 bp, Homo sapiens
agcgaatattagaga

SEQ ID NO: 2140061 - DNA, 15 bp, Homo sapiens
gcgaatattagagaa

SEQ ID NO: 2140062 - DNA, 15 bp, Homo sapiens
cgaatattagagaat

SEQ ID NO: 2140063 - DNA, 15 bp, Homo sapiens
gaatattagagaatg

SEQ ID NO: 2140064 - DNA, 15 bp, Homo sapiens
aatattagagaatgt

SEQ ID NO: 2140065 - DNA, 15 bp, Homo sapiens
atattagagaatgtt

SEQ ID NO: 2140066 - DNA, 15 bp, Homo sapiens
tattagagaatgttt

SEQ ID NO: 2140067 - DNA, 15 bp, Homo sapiens
attagagaatgttta

SEQ ID NO: 2140068 - DNA, 15 bp, Homo sapiens
ttagagaatgtttac

SEQ ID NO: 2140069 - DNA, 15 bp, Homo sapiens
tagagaatgtttaca

SEQ ID NO: 2140070 - DNA, 15 bp, Homo sapiens
agagaatgtttacat

SEQ ID NO: 2140071 - DNA, 15 bp, Homo sapiens
gagaatgtttacata

SEQ ID NO: 2140072 - DNA, 15 bp, Homo sapiens
agaatgtttacataa

SEQ ID NO: 2140073 - DNA, 15 bp, Homo sapiens
gaatgtttacataat

SEQ ID NO: 2140074 - DNA, 15 bp, Homo sapiens
aatgtttacataatg

SEQ ID NO: 2140075 - DNA, 15 bp, Homo sapiens
atgtttacataatgg

SEQ ID NO: 2140076 - DNA, 15 bp, Homo sapiens
tgtttacataatggt

SEQ ID NO: 2140077 - DNA, 15 bp, Homo sapiens
gtttacataatggtg

SEQ ID NO: 2140078 - DNA, 15 bp, Homo sapiens
tttacataatggtgt

SEQ ID NO: 2140079 - DNA, 15 bp, Homo sapiens
ttacataatggtgtt

SEQ ID NO: 2140080 - DNA, 15 bp, Homo sapiens
tacataatggtgttg

SEQ ID NO: 2140081 - DNA, 15 bp, Homo sapiens
acataatggtgttgg

SEQ ID NO: 2140082 - DNA, 15 bp, Homo sapiens
cataatggtgttggg

SEQ ID NO: 2140083 - DNA, 15 bp, Homo sapiens
ataatggtgttgggc

SEQ ID NO: 2140084 - DNA, 15 bp, Homo sapiens
taatggtgttgggcg

SEQ ID NO: 2140085 - DNA, 15 bp, Homo sapiens
aatggtgttgggcgg

SEQ ID NO: 2140086 - DNA, 15 bp, Homo sapiens
atggtgttgggcggg

SEQ ID NO: 2140087 - DNA, 15 bp, Homo sapiens
tggtgttgggcgggg

SEQ ID NO: 2140088 - DNA, 15 bp, Homo sapiens
ggtgttgggcggggg

SEQ ID NO: 2140089 - DNA, 15 bp, Homo sapiens
gtgttgggcgggggg

SEQ ID NO: 2140090 - DNA, 15 bp, Homo sapiens
tgttgggcgggggga

SEQ ID NO: 2140091 - DNA, 15 bp, Homo sapiens
gttgggcggggggac

SEQ ID NO: 2140092 - DNA, 15 bp, Homo sapiens
ttgggcggggggaca

SEQ ID NO: 2140093 - DNA, 15 bp, Homo sapiens
tgggcggggggacat

SEQ ID NO: 2140094 - DNA, 15 bp, Homo sapiens
gggcggggggacatt

SEQ ID NO: 2140095 - DNA, 15 bp, Homo sapiens
ggcggggggacattt

SEQ ID NO: 2140096 - DNA, 15 bp, Homo sapiens
gcggggggacattta

SEQ ID NO: 2140097 - DNA, 15 bp, Homo sapiens
cggggggacatttag

SEQ ID NO: 2140098 - DNA, 15 bp, Homo sapiens
ggggggacatttaga

SEQ ID NO: 2140099 - DNA, 15 bp, Homo sapiens
gggggacatttagaa

SEQ ID NO: 2140100 - DNA, 15 bp, Homo sapiens
ggggacatttagaat

SEQ ID NO: 2140101 - DNA, 15 bp, Homo sapiens
gggacatttagaata

SEQ ID NO: 2140102 - DNA, 15 bp, Homo sapiens
ggacatttagaatag

SEQ ID NO: 2140103 - DNA, 15 bp, Homo sapiens
gacatttagaatagc

SEQ ID NO: 2140104 - DNA, 15 bp, Homo sapiens
acatttagaatagcc

SEQ ID NO: 2140105 - DNA, 15 bp, Homo sapiens
catttagaatagccc

SEQ ID NO: 2140106 - DNA, 15 bp, Homo sapiens
atttagaatagcccc

SEQ ID NO: 2140107 - DNA, 15 bp, Homo sapiens
tttagaatagcccct

SEQ ID NO: 2140108 - DNA, 15 bp, Homo sapiens
ttagaatagcccctt

SEQ ID NO: 2140109 - DNA, 15 bp, Homo sapiens
tagaatagccccttc

SEQ ID NO: 2140110 - DNA, 15 bp, Homo sapiens
agaatagccccttca

SEQ ID NO: 2140111 - DNA, 15 bp, Homo sapiens
gaatagccccttcag

SEQ ID NO: 2140112 - DNA, 15 bp, Homo sapiens
aatagccccttcagt

SEQ ID NO: 2140113 - DNA, 15 bp, Homo sapiens
atagccccttcagta

SEQ ID NO: 2140114 - DNA, 15 bp, Homo sapiens
tagccccttcagtag

SEQ ID NO: 2140115 - DNA, 15 bp, Homo sapiens
agccccttcagtagc

SEQ ID NO: 2140116 - DNA, 15 bp, Homo sapiens
gccccttcagtagca

SEQ ID NO: 2140117 - DNA, 15 bp, Homo sapiens
ccccttcagtagcaa

SEQ ID NO: 2140118 - DNA, 15 bp, Homo sapiens
cccttcagtagcaag

SEQ ID NO: 2140119 - DNA, 15 bp, Homo sapiens
ccttcagtagcaaga

SEQ ID NO: 2140120 - DNA, 15 bp, Homo sapiens
cttcagtagcaagat

SEQ ID NO: 2140121 - DNA, 15 bp, Homo sapiens
ttcagtagcaagatt

SEQ ID NO: 2140122 - DNA, 15 bp, Homo sapiens
tcagtagcaagatta

SEQ ID NO: 2140123 - DNA, 15 bp, Homo sapiens
cagtagcaagattat

SEQ ID NO: 2140124 - DNA, 15 bp, Homo sapiens
agtagcaagattatg

SEQ ID NO: 2140125 - DNA, 15 bp, Homo sapiens
gtagcaagattatgc

SEQ ID NO: 2140126 - DNA, 15 bp, Homo sapiens
tagcaagattatgct

SEQ ID NO: 2140127 - DNA, 15 bp, Homo sapiens
agcaagattatgcta

SEQ ID NO: 2140128 - DNA, 15 bp, Homo sapiens
gcaagattatgctaa

SEQ ID NO: 2140129 - DNA, 15 bp, Homo sapiens
caagattatgctaag

SEQ ID NO: 2140130 - DNA, 15 bp, Homo sapiens
aagattatgctaagt

SEQ ID NO: 2140131 - DNA, 15 bp, Homo sapiens
agattatgctaagta

SEQ ID NO: 2140132 - DNA, 15 bp, Homo sapiens
gattatgctaagtaa

SEQ ID NO: 2140133 - DNA, 15 bp, Homo sapiens
attatgctaagtaaa

SEQ ID NO: 2140134 - DNA, 15 bp, Homo sapiens
ttatgctaagtaaag

SEQ ID NO: 2140135 - DNA, 15 bp, Homo sapiens
tatgctaagtaaagt

SEQ ID NO: 2140136 - DNA, 15 bp, Homo sapiens
atgctaagtaaagta

SEQ ID NO: 2140137 - DNA, 15 bp, Homo sapiens
tgctaagtaaagtac

SEQ ID NO: 2140138 - DNA, 15 bp, Homo sapiens
gctaagtaaagtact

SEQ ID NO: 2140139 - DNA, 15 bp, Homo sapiens
ctaagtaaagtactt

SEQ ID NO: 2140140 - DNA, 15 bp, Homo sapiens
taagtaaagtacttg

SEQ ID NO: 2140141 - DNA, 15 bp, Homo sapiens
aagtaaagtacttgt

SEQ ID NO: 2140142 - DNA, 15 bp, Homo sapiens
agtaaagtacttgtc

SEQ ID NO: 2140143 - DNA, 15 bp, Homo sapiens
gtaaagtacttgtct

SEQ ID NO: 2140144 - DNA, 15 bp, Homo sapiens
taaagtacttgtctc

SEQ ID NO: 2140145 - DNA, 15 bp, Homo sapiens
aaagtacttgtctca

SEQ ID NO: 2140146 - DNA, 15 bp, Homo sapiens
aagtacttgtctcat

SEQ ID NO: 2140147 - DNA, 15 bp, Homo sapiens
agtacttgtctcatc

SEQ ID NO: 2140148 - DNA, 15 bp, Homo sapiens
gtacttgtctcatct

SEQ ID NO: 2140149 - DNA, 15 bp, Homo sapiens
tacttgtctcatctt

SEQ ID NO: 2140150 - DNA, 15 bp, Homo sapiens
acttgtctcatctta

SEQ ID NO: 2140151 - DNA, 15 bp, Homo sapiens
cttgtctcatcttaa

SEQ ID NO: 2140152 - DNA, 15 bp, Homo sapiens
ttgtctcatcttaag

SEQ ID NO: 2140153 - DNA, 15 bp, Homo sapiens
tgtctcatcttaagc

SEQ ID NO: 2140154 - DNA, 15 bp, Homo sapiens
gtctcatcttaagct

SEQ ID NO: 2140155 - DNA, 15 bp, Homo sapiens
tctcatcttaagcta

SEQ ID NO: 2140156 - DNA, 15 bp, Homo sapiens
ctcatcttaagctat

SEQ ID NO: 2140157 - DNA, 15 bp, Homo sapiens
tcatcttaagctatt

SEQ ID NO: 2140158 - DNA, 15 bp, Homo sapiens
catcttaagctattt

SEQ ID NO: 2140159 - DNA, 15 bp, Homo sapiens
atcttaagctatttt

SEQ ID NO: 2140160 - DNA, 15 bp, Homo sapiens
tcttaagctattttt

SEQ ID NO: 2140161 - DNA, 15 bp, Homo sapiens
cttaagctatttttg

SEQ ID NO: 2140162 - DNA, 15 bp, Homo sapiens
ttaagctatttttgt

SEQ ID NO: 2140163 - DNA, 15 bp, Homo sapiens
taagctatttttgtt

SEQ ID NO: 2140164 - DNA, 15 bp, Homo sapiens
aagctatttttgttg

SEQ ID NO: 2140165 - DNA, 15 bp, Homo sapiens
agctatttttgttga

SEQ ID NO: 2140166 - DNA, 15 bp, Homo sapiens
gctatttttgttgag

SEQ ID NO: 2140167 - DNA, 15 bp, Homo sapiens
ctatttttgttgaga

SEQ ID NO: 2140168 - DNA, 15 bp, Homo sapiens
tatttttgttgagac

SEQ ID NO: 2140169 - DNA, 15 bp, Homo sapiens
atttttgttgagaca

SEQ ID NO: 2140170 - DNA, 15 bp, Homo sapiens
ttgttgagacaggga

SEQ ID NO: 2140171 - DNA, 15 bp, Homo sapiens
tgttgagacagggac

SEQ ID NO: 2140172 - DNA, 15 bp, Homo sapiens
gttgagacagggact

SEQ ID NO: 2140173 - DNA, 15 bp, Homo sapiens
ttgagacagggactg

SEQ ID NO: 2140174 - DNA, 15 bp, Homo sapiens
tgagacagggactgt

SEQ ID NO: 2140175 - DNA, 15 bp, Homo sapiens
gagacagggactgtg

SEQ ID NO: 2140176 - DNA, 15 bp, Homo sapiens
agacagggactgtgc

SEQ ID NO: 2140177 - DNA, 15 bp, Homo sapiens
gacagggactgtgca

SEQ ID NO: 2140178 - DNA, 15 bp, Homo sapiens
acagggactgtgcac

SEQ ID NO: 2140179 - DNA, 15 bp, Homo sapiens
cagggactgtgcaca

SEQ ID NO: 2140180 - DNA, 15 bp, Homo sapiens
agggactgtgcacag

SEQ ID NO: 2140181 - DNA, 15 bp, Homo sapiens
gggactgtgcacagc

SEQ ID NO: 2140182 - DNA, 15 bp, Homo sapiens
ggactgtgcacagct

SEQ ID NO: 2140183 - DNA, 15 bp, Homo sapiens
gactgtgcacagctc

SEQ ID NO: 2140184 - DNA, 15 bp, Homo sapiens
actgtgcacagctcc

SEQ ID NO: 2140185 - DNA, 15 bp, Homo sapiens
ctgtgcacagctccc

SEQ ID NO: 2140186 - DNA, 15 bp, Homo sapiens
tgtgcacagctccct

SEQ ID NO: 2140187 - DNA, 15 bp, Homo sapiens
gtgcacagctccctc

SEQ ID NO: 2140188 - DNA, 15 bp, Homo sapiens
tgcacagctccctct

SEQ ID NO: 2140189 - DNA, 15 bp, Homo sapiens
gcacagctccctctc

SEQ ID NO: 2140190 - DNA, 15 bp, Homo sapiens
cacagctccctctct

SEQ ID NO: 2140191 - DNA, 15 bp, Homo sapiens
acagctccctctcta

SEQ ID NO: 2140192 - DNA, 15 bp, Homo sapiens
cagctccctctctaa

SEQ ID NO: 2140193 - DNA, 15 bp, Homo sapiens
agctccctctctaat

SEQ ID NO: 2140194 - DNA, 15 bp, Homo sapiens
gctccctctctaatg

SEQ ID NO: 2140195 - DNA, 15 bp, Homo sapiens
ctccctctctaatgc

SEQ ID NO: 2140196 - DNA, 15 bp, Homo sapiens
tccctctctaatgcc

SEQ ID NO: 2140197 - DNA, 15 bp, Homo sapiens
ccctctctaatgcca

SEQ ID NO: 2140198 - DNA, 15 bp, Homo sapiens
cctctctaatgccaa

SEQ ID NO: 2140199 - DNA, 15 bp, Homo sapiens
ctctctaatgccaat

SEQ ID NO: 2140200 - DNA, 15 bp, Homo sapiens
tctctaatgccaatc

SEQ ID NO: 2140201 - DNA, 15 bp, Homo sapiens
ctctaatgccaatcc

SEQ ID NO: 2140202 - DNA, 15 bp, Homo sapiens
tctaatgccaatcct

SEQ ID NO: 2140203 - DNA, 15 bp, Homo sapiens
ctaatgccaatcctt

SEQ ID NO: 2140204 - DNA, 15 bp, Homo sapiens
taatgccaatccttg

SEQ ID NO: 2140205 - DNA, 15 bp, Homo sapiens
aatgccaatccttgc

SEQ ID NO: 2140206 - DNA, 15 bp, Homo sapiens
atgccaatccttgct

SEQ ID NO: 2140207 - DNA, 15 bp, Homo sapiens
tgccaatccttgctt

SEQ ID NO: 2140208 - DNA, 15 bp, Homo sapiens
gccaatccttgctta

SEQ ID NO: 2140209 - DNA, 15 bp, Homo sapiens
ccaatccttgcttaa

SEQ ID NO: 2140210 - DNA, 15 bp, Homo sapiens
caatccttgcttaat

SEQ ID NO: 2140211 - DNA, 15 bp, Homo sapiens
aatccttgcttaatt

SEQ ID NO: 2140212 - DNA, 15 bp, Homo sapiens
atccttgcttaattt

SEQ ID NO: 2140213 - DNA, 15 bp, Homo sapiens
tccttgcttaatttt

SEQ ID NO: 2140214 - DNA, 15 bp, Homo sapiens
ccttgcttaattttc

SEQ ID NO: 2140215 - DNA, 15 bp, Homo sapiens
cttgcttaattttcc

SEQ ID NO: 2140216 - DNA, 15 bp, Homo sapiens
ttgcttaattttccc

SEQ ID NO: 2140217 - DNA, 15 bp, Homo sapiens
tgcttaattttccct

SEQ ID NO: 2140218 - DNA, 15 bp, Homo sapiens
gcttaattttccctc

SEQ ID NO: 2140219 - DNA, 15 bp, Homo sapiens
cttaattttccctcc

SEQ ID NO: 2140220 - DNA, 15 bp, Homo sapiens
ttaattttccctcca

SEQ ID NO: 2140221 - DNA, 15 bp, Homo sapiens
taattttccctccaa

SEQ ID NO: 2140222 - DNA, 15 bp, Homo sapiens
aattttccctccaac

SEQ ID NO: 2140223 - DNA, 15 bp, Homo sapiens
attttccctccaacg

SEQ ID NO: 2140224 - DNA, 15 bp, Homo sapiens
ttttccctccaacga

SEQ ID NO: 2140225 - DNA, 15 bp, Homo sapiens
tttccctccaacgaa

SEQ ID NO: 2140226 - DNA, 15 bp, Homo sapiens
ttccctccaacgaag

SEQ ID NO: 2140227 - DNA, 15 bp, Homo sapiens
tccctccaacgaagt

SEQ ID NO: 2140228 - DNA, 15 bp, Homo sapiens
ccctccaacgaagtt

SEQ ID NO: 2140229 - DNA, 15 bp, Homo sapiens
cctccaacgaagttt

SEQ ID NO: 2140230 - DNA, 15 bp, Homo sapiens
ctccaacgaagtttc

SEQ ID NO: 2140231 - DNA, 15 bp, Homo sapiens
tccaacgaagtttct

SEQ ID NO: 2140232 - DNA, 15 bp, Homo sapiens
ccaacgaagtttctt

SEQ ID NO: 2140233 - DNA, 15 bp, Homo sapiens
caacgaagtttctta

SEQ ID NO: 2140234 - DNA, 15 bp, Homo sapiens
aacgaagtttcttac

SEQ ID NO: 2140235 - DNA, 15 bp, Homo sapiens
acgaagtttcttacc

SEQ ID NO: 2140236 - DNA, 15 bp, Homo sapiens
cgaagtttcttacct

SEQ ID NO: 2140237 - DNA, 15 bp, Homo sapiens
gaagtttcttacctg

SEQ ID NO: 2140238 - DNA, 15 bp, Homo sapiens
aagtttcttacctgt

SEQ ID NO: 2140239 - DNA, 15 bp, Homo sapiens
agtttcttacctgtt

SEQ ID NO: 2140240 - DNA, 15 bp, Homo sapiens
gtttcttacctgttc

SEQ ID NO: 2140241 - DNA, 15 bp, Homo sapiens
tttcttacctgttcc

SEQ ID NO: 2140242 - DNA, 15 bp, Homo sapiens
ttcttacctgttcct

SEQ ID NO: 2140243 - DNA, 15 bp, Homo sapiens
tcttacctgttcctc

SEQ ID NO: 2140244 - DNA, 15 bp, Homo sapiens
cttacctgttcctct

SEQ ID NO: 2140245 - DNA, 15 bp, Homo sapiens
ttacctgttcctctt

SEQ ID NO: 2140246 - DNA, 15 bp, Homo sapiens
tacctgttcctcttt

SEQ ID NO: 2140247 - DNA, 15 bp, Homo sapiens
acctgttcctcttta

SEQ ID NO: 2140248 - DNA, 15 bp, Homo sapiens
cctgttcctctttag

SEQ ID NO: 2140249 - DNA, 15 bp, Homo sapiens
ctgttcctctttaga

SEQ ID NO: 2140250 - DNA, 15 bp, Homo sapiens
tgttcctctttagaa

SEQ ID NO: 2140251 - DNA, 15 bp, Homo sapiens
gttcctctttagaat

SEQ ID NO: 2140252 - DNA, 15 bp, Homo sapiens
ttcctctttagaata

SEQ ID NO: 2140253 - DNA, 15 bp, Homo sapiens
tcctctttagaataa

SEQ ID NO: 2140254 - DNA, 15 bp, Homo sapiens
cctctttagaataag

SEQ ID NO: 2140255 - DNA, 15 bp, Homo sapiens
ctctttagaataaga

SEQ ID NO: 2140256 - DNA, 15 bp, Homo sapiens
ctttagaataagaaa

SEQ ID NO: 2140257 - DNA, 15 bp, Homo sapiens
tttagaataagaaat

SEQ ID NO: 2140258 - DNA, 15 bp, Homo sapiens
ttagaataagaaatg

SEQ ID NO: 2140259 - DNA, 15 bp, Homo sapiens
tagaataagaaatgc

SEQ ID NO: 2140260 - DNA, 15 bp, Homo sapiens
agaataagaaatgct

SEQ ID NO: 2140261 - DNA, 15 bp, Homo sapiens
gaataagaaatgctg

SEQ ID NO: 2140262 - DNA, 15 bp, Homo sapiens
aataagaaatgctgg

SEQ ID NO: 2140263 - DNA, 15 bp, Homo sapiens
ataagaaatgctgga

SEQ ID NO: 2140264 - DNA, 15 bp, Homo sapiens
taagaaatgctggag

SEQ ID NO: 2140265 - DNA, 15 bp, Homo sapiens
aagaaatgctggagg

SEQ ID NO: 2140266 - DNA, 15 bp, Homo sapiens
agaaatgctggagga

SEQ ID NO: 2140267 - DNA, 15 bp, Homo sapiens
gaaatgctggaggaa

SEQ ID NO: 2140268 - DNA, 15 bp, Homo sapiens
aaatgctggaggaat

SEQ ID NO: 2140269 - DNA, 15 bp, Homo sapiens
aatgctggaggaatg

SEQ ID NO: 2140270 - DNA, 15 bp, Homo sapiens
atgctggaggaatgg

SEQ ID NO: 2140271 - DNA, 15 bp, Homo sapiens
tgctggaggaatggt

SEQ ID NO: 2140272 - DNA, 15 bp, Homo sapiens
gctggaggaatggtc

SEQ ID NO: 2140273 - DNA, 15 bp, Homo sapiens
ctggaggaatggtca

SEQ ID NO: 2140274 - DNA, 15 bp, Homo sapiens
tggaggaatggtcag

SEQ ID NO: 2140275 - DNA, 15 bp, Homo sapiens
ggaggaatggtcagc

SEQ ID NO: 2140276 - DNA, 15 bp, Homo sapiens
gaggaatggtcagcg

SEQ ID NO: 2140277 - DNA, 15 bp, Homo sapiens
aggaatggtcagcgt

SEQ ID NO: 2140278 - DNA, 15 bp, Homo sapiens
ggaatggtcagcgtt

SEQ ID NO: 2140279 - DNA, 15 bp, Homo sapiens
gaatggtcagcgttg

SEQ ID NO: 2140280 - DNA, 15 bp, Homo sapiens
aatggtcagcgttga

SEQ ID NO: 2140281 - DNA, 15 bp, Homo sapiens
atggtcagcgttgaa

SEQ ID NO: 2140282 - DNA, 15 bp, Homo sapiens
tggtcagcgttgaag

SEQ ID NO: 2140283 - DNA, 15 bp, Homo sapiens
ggtcagcgttgaagg

SEQ ID NO: 2140284 - DNA, 15 bp, Homo sapiens
gtcagcgttgaagga

SEQ ID NO: 2140285 - DNA, 15 bp, Homo sapiens
tcagcgttgaaggaa

SEQ ID NO: 2140286 - DNA, 15 bp, Homo sapiens
cagcgttgaaggaag

SEQ ID NO: 2140287 - DNA, 15 bp, Homo sapiens
agcgttgaaggaagt

SEQ ID NO: 2140288 - DNA, 15 bp, Homo sapiens
gcgttgaaggaagta

SEQ ID NO: 2140289 - DNA, 15 bp, Homo sapiens
cgttgaaggaagtaa

SEQ ID NO: 2140290 - DNA, 15 bp, Homo sapiens
gttgaaggaagtaag

SEQ ID NO: 2140291 - DNA, 15 bp, Homo sapiens
ttgaaggaagtaagc

SEQ ID NO: 2140292 - DNA, 15 bp, Homo sapiens
tgaaggaagtaagcc

SEQ ID NO: 2140293 - DNA, 15 bp, Homo sapiens
gaaggaagtaagcct

SEQ ID NO: 2140294 - DNA, 15 bp, Homo sapiens
aaggaagtaagccta

SEQ ID NO: 2140295 - DNA, 15 bp, Homo sapiens
aggaagtaagcctat

SEQ ID NO: 2140296 - DNA, 15 bp, Homo sapiens
ggaagtaagcctata

SEQ ID NO: 2140297 - DNA, 15 bp, Homo sapiens
gaagtaagcctataa

SEQ ID NO: 2140298 - DNA, 15 bp, Homo sapiens
aagtaagcctataag

SEQ ID NO: 2140299 - DNA, 15 bp, Homo sapiens
agtaagcctataagg

SEQ ID NO: 2140300 - DNA, 15 bp, Homo sapiens
gtaagcctataaggg

SEQ ID NO: 2140301 - DNA, 15 bp, Homo sapiens
taagcctataaggga

SEQ ID NO: 2140302 - DNA, 15 bp, Homo sapiens
aagcctataagggaa

SEQ ID NO: 2140303 - DNA, 15 bp, Homo sapiens
agcctataagggaag

SEQ ID NO: 2140304 - DNA, 15 bp, Homo sapiens
gcctataagggaagg

SEQ ID NO: 2140305 - DNA, 15 bp, Homo sapiens
cctataagggaaggc

SEQ ID NO: 2140306 - DNA, 15 bp, Homo sapiens
ctataagggaaggca

SEQ ID NO: 2140307 - DNA, 15 bp, Homo sapiens
tataagggaaggcac

SEQ ID NO: 2140308 - DNA, 15 bp, Homo sapiens
ataagggaaggcaca

SEQ ID NO: 2140309 - DNA, 15 bp, Homo sapiens
taagggaaggcacag

SEQ ID NO: 2140310 - DNA, 15 bp, Homo sapiens
aagggaaggcacaga

SEQ ID NO: 2140311 - DNA, 15 bp, Homo sapiens
agggaaggcacagaa

SEQ ID NO: 2140312 - DNA, 15 bp, Homo sapiens
gggaaggcacagaag

SEQ ID NO: 2140313 - DNA, 15 bp, Homo sapiens
ggaaggcacagaaga

SEQ ID NO: 2140314 - DNA, 15 bp, Homo sapiens
gaaggcacagaagat

SEQ ID NO: 2140315 - DNA, 15 bp, Homo sapiens
aaggcacagaagatg

SEQ ID NO: 2140316 - DNA, 15 bp, Homo sapiens
aggcacagaagatga

SEQ ID NO: 2140317 - DNA, 15 bp, Homo sapiens
ggcacagaagatgac

SEQ ID NO: 2140318 - DNA, 15 bp, Homo sapiens
gcacagaagatgaca

SEQ ID NO: 2140319 - DNA, 15 bp, Homo sapiens
cacagaagatgacat

SEQ ID NO: 2140320 - DNA, 15 bp, Homo sapiens
acagaagatgacatc

SEQ ID NO: 2140321 - DNA, 15 bp, Homo sapiens
cagaagatgacatca

SEQ ID NO: 2140322 - DNA, 15 bp, Homo sapiens
agaagatgacatcag

SEQ ID NO: 2140323 - DNA, 15 bp, Homo sapiens
gaagatgacatcagg

SEQ ID NO: 2140324 - DNA, 15 bp, Homo sapiens
aagatgacatcaggc

SEQ ID NO: 2140325 - DNA, 15 bp, Homo sapiens
agatgacatcaggct

SEQ ID NO: 2140326 - DNA, 15 bp, Homo sapiens
gatgacatcaggctt

SEQ ID NO: 2140327 - DNA, 15 bp, Homo sapiens
atgacatcaggcttt

SEQ ID NO: 2140328 - DNA, 15 bp, Homo sapiens
tgacatcaggcttta

SEQ ID NO: 2140329 - DNA, 15 bp, Homo sapiens
gacatcaggctttag

SEQ ID NO: 2140330 - DNA, 15 bp, Homo sapiens
acatcaggctttaga

SEQ ID NO: 2140331 - DNA, 15 bp, Homo sapiens
catcaggctttagaa

SEQ ID NO: 2140332 - DNA, 15 bp, Homo sapiens
atcaggctttagaat

SEQ ID NO: 2140333 - DNA, 15 bp, Homo sapiens
tcaggctttagaata

SEQ ID NO: 2140334 - DNA, 15 bp, Homo sapiens
caggctttagaatag

SEQ ID NO: 2140335 - DNA, 15 bp, Homo sapiens
aggctttagaatagg

SEQ ID NO: 2140336 - DNA, 15 bp, Homo sapiens
ggctttagaataggt

SEQ ID NO: 2140337 - DNA, 15 bp, Homo sapiens
gctttagaataggta

SEQ ID NO: 2140338 - DNA, 15 bp, Homo sapiens
ctttagaataggtag

SEQ ID NO: 2140339 - DNA, 15 bp, Homo sapiens
tttagaataggtagg

SEQ ID NO: 2140340 - DNA, 15 bp, Homo sapiens
ttagaataggtaggc

SEQ ID NO: 2140341 - DNA, 15 bp, Homo sapiens
tagaataggtaggca

SEQ ID NO: 2140342 - DNA, 15 bp, Homo sapiens
agaataggtaggcac

SEQ ID NO: 2140343 - DNA, 15 bp, Homo sapiens
gaataggtaggcaca

SEQ ID NO: 2140344 - DNA, 15 bp, Homo sapiens
aataggtaggcacag

SEQ ID NO: 2140345 - DNA, 15 bp, Homo sapiens
ataggtaggcacaga

SEQ ID NO: 2140346 - DNA, 15 bp, Homo sapiens
taggtaggcacagaa

SEQ ID NO: 2140347 - DNA, 15 bp, Homo sapiens
aggtaggcacagaaa

SEQ ID NO: 2140348 - DNA, 15 bp, Homo sapiens
ggtaggcacagaaag

SEQ ID NO: 2140349 - DNA, 15 bp, Homo sapiens
gtaggcacagaaaga

SEQ ID NO: 2140350 - DNA, 15 bp, Homo sapiens
taggcacagaaagac

SEQ ID NO: 2140351 - DNA, 15 bp, Homo sapiens
aggcacagaaagact

SEQ ID NO: 2140352 - DNA, 15 bp, Homo sapiens
ggcacagaaagactg

SEQ ID NO: 2140353 - DNA, 15 bp, Homo sapiens
gcacagaaagactgg

SEQ ID NO: 2140354 - DNA, 15 bp, Homo sapiens
cacagaaagactggt

SEQ ID NO: 2140355 - DNA, 15 bp, Homo sapiens
acagaaagactggta

SEQ ID NO: 2140356 - DNA, 15 bp, Homo sapiens
cagaaagactggtat

SEQ ID NO: 2140357 - DNA, 15 bp, Homo sapiens
agaaagactggtatc

SEQ ID NO: 2140358 - DNA, 15 bp, Homo sapiens
gaaagactggtatca

SEQ ID NO: 2140359 - DNA, 15 bp, Homo sapiens
aaagactggtatcaa

SEQ ID NO: 2140360 - DNA, 15 bp, Homo sapiens
aagactggtatcaag

SEQ ID NO: 2140361 - DNA, 15 bp, Homo sapiens
agactggtatcaagc

SEQ ID NO: 2140362 - DNA, 15 bp, Homo sapiens
gactggtatcaagca

SEQ ID NO: 2140363 - DNA, 15 bp, Homo sapiens
actggtatcaagcaa

SEQ ID NO: 2140364 - DNA, 15 bp, Homo sapiens
ctggtatcaagcaag

SEQ ID NO: 2140365 - DNA, 15 bp, Homo sapiens
tggtatcaagcaaga

SEQ ID NO: 2140366 - DNA, 15 bp, Homo sapiens
ggtatcaagcaagag

SEQ ID NO: 2140367 - DNA, 15 bp, Homo sapiens
gtatcaagcaagagg

SEQ ID NO: 2140368 - DNA, 15 bp, Homo sapiens
tatcaagcaagaggt

SEQ ID NO: 2140369 - DNA, 15 bp, Homo sapiens
atcaagcaagaggtc

SEQ ID NO: 2140370 - DNA, 15 bp, Homo sapiens
tcaagcaagaggtcc

SEQ ID NO: 2140371 - DNA, 15 bp, Homo sapiens
caagcaagaggtccc

SEQ ID NO: 2140372 - DNA, 15 bp, Homo sapiens
aagcaagaggtccca

SEQ ID NO: 2140373 - DNA, 15 bp, Homo sapiens
agcaagaggtcccat

SEQ ID NO: 2140374 - DNA, 15 bp, Homo sapiens
gcaagaggtcccata

SEQ ID NO: 2140375 - DNA, 15 bp, Homo sapiens
caagaggtcccatat

SEQ ID NO: 2140376 - DNA, 15 bp, Homo sapiens
aagaggtcccatatc

SEQ ID NO: 2140377 - DNA, 15 bp, Homo sapiens
agaggtcccatatcc

SEQ ID NO: 2140378 - DNA, 15 bp, Homo sapiens
gaggtcccatatcct

SEQ ID NO: 2140379 - DNA, 15 bp, Homo sapiens
aggtcccatatccta

SEQ ID NO: 2140380 - DNA, 15 bp, Homo sapiens
ggtcccatatcctag

SEQ ID NO: 2140381 - DNA, 15 bp, Homo sapiens
gtcccatatcctaga

SEQ ID NO: 2140382 - DNA, 15 bp, Homo sapiens
tcccatatcctagag

SEQ ID NO: 2140383 - DNA, 15 bp, Homo sapiens
cccatatcctagagg

SEQ ID NO: 2140384 - DNA, 15 bp, Homo sapiens
ccatatcctagaggt

SEQ ID NO: 2140385 - DNA, 15 bp, Homo sapiens
catatcctagaggtt

SEQ ID NO: 2140386 - DNA, 15 bp, Homo sapiens
atatcctagaggttc

SEQ ID NO: 2140387 - DNA, 15 bp, Homo sapiens
tatcctagaggttca

SEQ ID NO: 2140388 - DNA, 15 bp, Homo sapiens
atcctagaggttcaa

SEQ ID NO: 2140389 - DNA, 15 bp, Homo sapiens
tcctagaggttcaaa

SEQ ID NO: 2140390 - DNA, 15 bp, Homo sapiens
cctagaggttcaaaa

SEQ ID NO: 2140391 - DNA, 15 bp, Homo sapiens
ctagaggttcaaaac

SEQ ID NO: 2140392 - DNA, 15 bp, Homo sapiens
tagaggttcaaaaca

SEQ ID NO: 2140393 - DNA, 15 bp, Homo sapiens
agaggttcaaaacag

SEQ ID NO: 2140394 - DNA, 15 bp, Homo sapiens
gaggttcaaaacaga

SEQ ID NO: 2140395 - DNA, 15 bp, Homo sapiens
aggttcaaaacagat

SEQ ID NO: 2140396 - DNA, 15 bp, Homo sapiens
ggttcaaaacagatg

SEQ ID NO: 2140397 - DNA, 15 bp, Homo sapiens
gttcaaaacagatgt

SEQ ID NO: 2140398 - DNA, 15 bp, Homo sapiens
ttcaaaacagatgtt

SEQ ID NO: 2140399 - DNA, 15 bp, Homo sapiens
tcaaaacagatgttc

SEQ ID NO: 2140400 - DNA, 15 bp, Homo sapiens
caaaacagatgttca

SEQ ID NO: 2140401 - DNA, 15 bp, Homo sapiens
aaaacagatgttcac

SEQ ID NO: 2140402 - DNA, 15 bp, Homo sapiens
aaacagatgttcact

SEQ ID NO: 2140403 - DNA, 15 bp, Homo sapiens
aacagatgttcactg

SEQ ID NO: 2140404 - DNA, 15 bp, Homo sapiens
acagatgttcactgg

SEQ ID NO: 2140405 - DNA, 15 bp, Homo sapiens
cagatgttcactggt

SEQ ID NO: 2140406 - DNA, 15 bp, Homo sapiens
agatgttcactggta

SEQ ID NO: 2140407 - DNA, 15 bp, Homo sapiens
gatgttcactggtag

SEQ ID NO: 2140408 - DNA, 15 bp, Homo sapiens
atgttcactggtagg

SEQ ID NO: 2140409 - DNA, 15 bp, Homo sapiens
tgttcactggtaggg

SEQ ID NO: 2140410 - DNA, 15 bp, Homo sapiens
gttcactggtaggga

SEQ ID NO: 2140411 - DNA, 15 bp, Homo sapiens
ttcactggtagggag

SEQ ID NO: 2140412 - DNA, 15 bp, Homo sapiens
tcactggtagggaga

SEQ ID NO: 2140413 - DNA, 15 bp, Homo sapiens
cactggtagggagaa

SEQ ID NO: 2140414 - DNA, 15 bp, Homo sapiens
ctggtagggagaaaa

SEQ ID NO: 2140415 - DNA, 15 bp, Homo sapiens
tggtagggagaaaag

SEQ ID NO: 2140416 - DNA, 15 bp, Homo sapiens
ggtagggagaaaagt

SEQ ID NO: 2140417 - DNA, 15 bp, Homo sapiens
gtagggagaaaagtg

SEQ ID NO: 2140418 - DNA, 15 bp, Homo sapiens
tagggagaaaagtgg

SEQ ID NO: 2140419 - DNA, 15 bp, Homo sapiens
agggagaaaagtggg

SEQ ID NO: 2140420 - DNA, 15 bp, Homo sapiens
gggagaaaagtgggc

SEQ ID NO: 2140421 - DNA, 15 bp, Homo sapiens
ggagaaaagtgggca

SEQ ID NO: 2140422 - DNA, 15 bp, Homo sapiens
gagaaaagtgggcag

SEQ ID NO: 2140423 - DNA, 15 bp, Homo sapiens
agaaaagtgggcaga

SEQ ID NO: 2140424 - DNA, 15 bp, Homo sapiens
gaaaagtgggcagat

SEQ ID NO: 2140425 - DNA, 15 bp, Homo sapiens
aaaagtgggcagatt

SEQ ID NO: 2140426 - DNA, 15 bp, Homo sapiens
aaagtgggcagattt

SEQ ID NO: 2140427 - DNA, 15 bp, Homo sapiens
aagtgggcagattta

SEQ ID NO: 2140428 - DNA, 15 bp, Homo sapiens
agtgggcagatttac

SEQ ID NO: 2140429 - DNA, 15 bp, Homo sapiens
gtgggcagatttacc

SEQ ID NO: 2140430 - DNA, 15 bp, Homo sapiens
tgggcagatttacct

SEQ ID NO: 2140431 - DNA, 15 bp, Homo sapiens
gggcagatttacctg

SEQ ID NO: 2140432 - DNA, 15 bp, Homo sapiens
ggcagatttacctga

SEQ ID NO: 2140433 - DNA, 15 bp, Homo sapiens
gcagatttacctgat

SEQ ID NO: 2140434 - DNA, 15 bp, Homo sapiens
cagatttacctgata

SEQ ID NO: 2140435 - DNA, 15 bp, Homo sapiens
agatttacctgatag

SEQ ID NO: 2140436 - DNA, 15 bp, Homo sapiens
gatttacctgatagg

SEQ ID NO: 2140437 - DNA, 15 bp, Homo sapiens
atttacctgataggc

SEQ ID NO: 2140438 - DNA, 15 bp, Homo sapiens
tttacctgataggct

SEQ ID NO: 2140439 - DNA, 15 bp, Homo sapiens
ttacctgataggctg

SEQ ID NO: 2140440 - DNA, 15 bp, Homo sapiens
tacctgataggctga

SEQ ID NO: 2140441 - DNA, 15 bp, Homo sapiens
acctgataggctgat

SEQ ID NO: 2140442 - DNA, 15 bp, Homo sapiens
cctgataggctgatt

SEQ ID NO: 2140443 - DNA, 15 bp, Homo sapiens
ctgataggctgatta

SEQ ID NO: 2140444 - DNA, 15 bp, Homo sapiens
tgataggctgattaa

SEQ ID NO: 2140445 - DNA, 15 bp, Homo sapiens
gataggctgattaaa

SEQ ID NO: 2140446 - DNA, 15 bp, Homo sapiens
ataggctgattaaac

SEQ ID NO: 2140447 - DNA, 15 bp, Homo sapiens
taggctgattaaaca

SEQ ID NO: 2140448 - DNA, 15 bp, Homo sapiens
aggctgattaaacag

SEQ ID NO: 2140449 - DNA, 15 bp, Homo sapiens
ggctgattaaacaga

SEQ ID NO: 2140450 - DNA, 15 bp, Homo sapiens
gctgattaaacagat

SEQ ID NO: 2140451 - DNA, 15 bp, Homo sapiens
ctgattaaacagata

SEQ ID NO: 2140452 - DNA, 15 bp, Homo sapiens
tgattaaacagatac

SEQ ID NO: 2140453 - DNA, 15 bp, Homo sapiens
gattaaacagataca

SEQ ID NO: 2140454 - DNA, 15 bp, Homo sapiens
attaaacagatacaa

SEQ ID NO: 2140455 - DNA, 15 bp, Homo sapiens
ttaaacagatacaaa

SEQ ID NO: 2140456 - DNA, 15 bp, Homo sapiens
taaacagatacaaat

SEQ ID NO: 2140457 - DNA, 15 bp, Homo sapiens
aaacagatacaaatg

SEQ ID NO: 2140458 - DNA, 15 bp, Homo sapiens
aacagatacaaatgc

SEQ ID NO: 2140459 - DNA, 15 bp, Homo sapiens
acagatacaaatgcc

SEQ ID NO: 2140460 - DNA, 15 bp, Homo sapiens
cagatacaaatgcca

SEQ ID NO: 2140461 - DNA, 15 bp, Homo sapiens
agatacaaatgccat

SEQ ID NO: 2140462 - DNA, 15 bp, Homo sapiens
gatacaaatgccatt

SEQ ID NO: 2140463 - DNA, 15 bp, Homo sapiens
atacaaatgccattt

SEQ ID NO: 2140464 - DNA, 15 bp, Homo sapiens
tacaaatgccattta

SEQ ID NO: 2140465 - DNA, 15 bp, Homo sapiens
acaaatgccatttag

SEQ ID NO: 2140466 - DNA, 15 bp, Homo sapiens
caaatgccatttaga

SEQ ID NO: 2140467 - DNA, 15 bp, Homo sapiens
aaatgccatttagat

SEQ ID NO: 2140468 - DNA, 15 bp, Homo sapiens
aatgccatttagatg

SEQ ID NO: 2140469 - DNA, 15 bp, Homo sapiens
atgccatttagatgc

SEQ ID NO: 2140470 - DNA, 15 bp, Homo sapiens
tgccatttagatgct

SEQ ID NO: 2140471 - DNA, 15 bp, Homo sapiens
gccatttagatgctt

SEQ ID NO: 2140472 - DNA, 15 bp, Homo sapiens
ccatttagatgcttc

SEQ ID NO: 2140473 - DNA, 15 bp, Homo sapiens
catttagatgcttct

SEQ ID NO: 2140474 - DNA, 15 bp, Homo sapiens
atttagatgcttcta

SEQ ID NO: 2140475 - DNA, 15 bp, Homo sapiens
tttagatgcttctat

SEQ ID NO: 2140476 - DNA, 15 bp, Homo sapiens
ttagatgcttctata

SEQ ID NO: 2140477 - DNA, 15 bp, Homo sapiens
tagatgcttctataa

SEQ ID NO: 2140478 - DNA, 15 bp, Homo sapiens
agatgcttctataac

SEQ ID NO: 2140479 - DNA, 15 bp, Homo sapiens
gatgcttctataact

SEQ ID NO: 2140480 - DNA, 15 bp, Homo sapiens
atgcttctataactc

SEQ ID NO: 2140481 - DNA, 15 bp, Homo sapiens
tgcttctataactct

SEQ ID NO: 2140482 - DNA, 15 bp, Homo sapiens
gcttctataactctt

SEQ ID NO: 2140483 - DNA, 15 bp, Homo sapiens
cttctataactcttg

SEQ ID NO: 2140484 - DNA, 15 bp, Homo sapiens
ttctataactcttgc

SEQ ID NO: 2140485 - DNA, 15 bp, Homo sapiens
tctataactcttgcc

SEQ ID NO: 2140486 - DNA, 15 bp, Homo sapiens
ctataactcttgcct

SEQ ID NO: 2140487 - DNA, 15 bp, Homo sapiens
tataactcttgccta

SEQ ID NO: 2140488 - DNA, 15 bp, Homo sapiens
ataactcttgcctat

SEQ ID NO: 2140489 - DNA, 15 bp, Homo sapiens
taactcttgcctata

SEQ ID NO: 2140490 - DNA, 15 bp, Homo sapiens
aactcttgcctatat

SEQ ID NO: 2140491 - DNA, 15 bp, Homo sapiens
actcttgcctatatt

SEQ ID NO: 2140492 - DNA, 15 bp, Homo sapiens
ctcttgcctatattc

SEQ ID NO: 2140493 - DNA, 15 bp, Homo sapiens
tcttgcctatattct

SEQ ID NO: 2140494 - DNA, 15 bp, Homo sapiens
cttgcctatattctg

SEQ ID NO: 2140495 - DNA, 15 bp, Homo sapiens
ttgcctatattctga

SEQ ID NO: 2140496 - DNA, 15 bp, Homo sapiens
tgcctatattctgat

SEQ ID NO: 2140497 - DNA, 15 bp, Homo sapiens
gcctatattctgatt

SEQ ID NO: 2140498 - DNA, 15 bp, Homo sapiens
cctatattctgattc

SEQ ID NO: 2140499 - DNA, 15 bp, Homo sapiens
ctatattctgattcc

SEQ ID NO: 2140500 - DNA, 15 bp, Homo sapiens
tatattctgattcct

SEQ ID NO: 2140501 - DNA, 15 bp, Homo sapiens
atattctgattcctt

SEQ ID NO: 2140502 - DNA, 15 bp, Homo sapiens
tattctgattccttc

SEQ ID NO: 2140503 - DNA, 15 bp, Homo sapiens
attctgattccttct

SEQ ID NO: 2140504 - DNA, 15 bp, Homo sapiens
ttctgattccttctc

SEQ ID NO: 2140505 - DNA, 15 bp, Homo sapiens
tctgattccttctca

SEQ ID NO: 2140506 - DNA, 15 bp, Homo sapiens
ctgattccttctcac

SEQ ID NO: 2140507 - DNA, 15 bp, Homo sapiens
tgattccttctcacc

SEQ ID NO: 2140508 - DNA, 15 bp, Homo sapiens
gattccttctcacct

SEQ ID NO: 2140509 - DNA, 15 bp, Homo sapiens
attccttctcacctt

SEQ ID NO: 2140510 - DNA, 15 bp, Homo sapiens
ttccttctcacctta

SEQ ID NO: 2140511 - DNA, 15 bp, Homo sapiens
tccttctcaccttag

SEQ ID NO: 2140512 - DNA, 15 bp, Homo sapiens
ccttctcaccttagt

SEQ ID NO: 2140513 - DNA, 15 bp, Homo sapiens
cttctcaccttagtg

SEQ ID NO: 2140514 - DNA, 15 bp, Homo sapiens
ttctcaccttagtgt

SEQ ID NO: 2140515 - DNA, 15 bp, Homo sapiens
tctcaccttagtgtt

SEQ ID NO: 2140516 - DNA, 15 bp, Homo sapiens
ctcaccttagtgttt

SEQ ID NO: 2140517 - DNA, 15 bp, Homo sapiens
tcaccttagtgttta

SEQ ID NO: 2140518 - DNA, 15 bp, Homo sapiens
caccttagtgtttat

SEQ ID NO: 2140519 - DNA, 15 bp, Homo sapiens
accttagtgtttata

SEQ ID NO: 2140520 - DNA, 15 bp, Homo sapiens
ccttagtgtttatag

SEQ ID NO: 2140521 - DNA, 15 bp, Homo sapiens
cttagtgtttatagc

SEQ ID NO: 2140522 - DNA, 15 bp, Homo sapiens
ttagtgtttatagct

SEQ ID NO: 2140523 - DNA, 15 bp, Homo sapiens
tagtgtttatagctt

SEQ ID NO: 2140524 - DNA, 15 bp, Homo sapiens
agtgtttatagcttt

SEQ ID NO: 2140525 - DNA, 15 bp, Homo sapiens
gtgtttatagctttt

SEQ ID NO: 2140526 - DNA, 15 bp, Homo sapiens
tgtttatagcttttg

SEQ ID NO: 2140527 - DNA, 15 bp, Homo sapiens
gtttatagcttttgc

SEQ ID NO: 2140528 - DNA, 15 bp, Homo sapiens
tttatagcttttgcc

SEQ ID NO: 2140529 - DNA, 15 bp, Homo sapiens
ttatagcttttgccc

SEQ ID NO: 2140530 - DNA, 15 bp, Homo sapiens
tatagcttttgcccc

SEQ ID NO: 2140531 - DNA, 15 bp, Homo sapiens
atagcttttgcccca

SEQ ID NO: 2140532 - DNA, 15 bp, Homo sapiens
tagcttttgccccat

SEQ ID NO: 2140533 - DNA, 15 bp, Homo sapiens
agcttttgccccatc

SEQ ID NO: 2140534 - DNA, 15 bp, Homo sapiens
gcttttgccccatca

SEQ ID NO: 2140535 - DNA, 15 bp, Homo sapiens
cttttgccccatcaa

SEQ ID NO: 2140536 - DNA, 15 bp, Homo sapiens
ttttgccccatcaac

SEQ ID NO: 2140537 - DNA, 15 bp, Homo sapiens
tttgccccatcaact

SEQ ID NO: 2140538 - DNA, 15 bp, Homo sapiens
ttgccccatcaactg

SEQ ID NO: 2140539 - DNA, 15 bp, Homo sapiens
tgccccatcaactgt

SEQ ID NO: 2140540 - DNA, 15 bp, Homo sapiens
gccccatcaactgtt

SEQ ID NO: 2140541 - DNA, 15 bp, Homo sapiens
ccccatcaactgttt

SEQ ID NO: 2140542 - DNA, 15 bp, Homo sapiens
cccatcaactgtttt

SEQ ID NO: 2140543 - DNA, 15 bp, Homo sapiens
ccatcaactgttttc

SEQ ID NO: 2140544 - DNA, 15 bp, Homo sapiens
catcaactgttttct

SEQ ID NO: 2140545 - DNA, 15 bp, Homo sapiens
atcaactgttttctc

SEQ ID NO: 2140546 - DNA, 15 bp, Homo sapiens
tcaactgttttctct

SEQ ID NO: 2140547 - DNA, 15 bp, Homo sapiens
caactgttttctctg

SEQ ID NO: 2140548 - DNA, 15 bp, Homo sapiens
aactgttttctctgt

SEQ ID NO: 2140549 - DNA, 15 bp, Homo sapiens
actgttttctctgta

SEQ ID NO: 2140550 - DNA, 15 bp, Homo sapiens
ctgttttctctgtac

SEQ ID NO: 2140551 - DNA, 15 bp, Homo sapiens
tgttttctctgtaca

SEQ ID NO: 2140552 - DNA, 15 bp, Homo sapiens
gttttctctgtacat

SEQ ID NO: 2140553 - DNA, 15 bp, Homo sapiens
ttttctctgtacatt

SEQ ID NO: 2140554 - DNA, 15 bp, Homo sapiens
tttctctgtacattt

SEQ ID NO: 2140555 - DNA, 15 bp, Homo sapiens
ttctctgtacatttc

SEQ ID NO: 2140556 - DNA, 15 bp, Homo sapiens
tctctgtacatttcc

SEQ ID NO: 2140557 - DNA, 15 bp, Homo sapiens
ctctgtacatttcct

SEQ ID NO: 2140558 - DNA, 15 bp, Homo sapiens
tctgtacatttccta

SEQ ID NO: 2140559 - DNA, 15 bp, Homo sapiens
ctgtacatttcctaa

SEQ ID NO: 2140560 - DNA, 15 bp, Homo sapiens
tgtacatttcctaat

SEQ ID NO: 2140561 - DNA, 15 bp, Homo sapiens
gtacatttcctaata

SEQ ID NO: 2140562 - DNA, 15 bp, Homo sapiens
tacatttcctaataa

SEQ ID NO: 2140563 - DNA, 15 bp, Homo sapiens
acatttcctaataaa

SEQ ID NO: 2140564 - DNA, 15 bp, Homo sapiens
catttcctaataaaa

SEQ ID NO: 2140565 - DNA, 15 bp, Homo sapiens
atttcctaataaaat

SEQ ID NO: 2140566 - DNA, 15 bp, Homo sapiens
tttcctaataaaatc

SEQ ID NO: 2140567 - DNA, 15 bp, Homo sapiens
ttcctaataaaatct

SEQ ID NO: 2140568 - DNA, 15 bp, Homo sapiens
tcctaataaaatctc

SEQ ID NO: 2140569 - DNA, 15 bp, Homo sapiens
cctaataaaatctct

SEQ ID NO: 2140570 - DNA, 15 bp, Homo sapiens
ctaataaaatctctg

SEQ ID NO: 2140571 - DNA, 15 bp, Homo sapiens
taataaaatctctga

SEQ ID NO: 2140572 - DNA, 15 bp, Homo sapiens
aataaaatctctgaa

SEQ ID NO: 2140573 - DNA, 15 bp, Homo sapiens
ataaaatctctgaaa

SEQ ID NO: 2140574 - DNA, 15 bp, Homo sapiens
taaaatctctgaaac

SEQ ID NO: 2140575 - DNA, 15 bp, Homo sapiens
aaaatctctgaaaca

SEQ ID NO: 2140576 - DNA, 15 bp, Homo sapiens
aaatctctgaaacac

SEQ ID NO: 2140577 - DNA, 15 bp, Homo sapiens
aatctctgaaacacc

SEQ ID NO: 2140578 - DNA, 15 bp, Homo sapiens
atctctgaaacaccc

SEQ ID NO: 2140579 - DNA, 15 bp, Homo sapiens
tctctgaaacacccc

SEQ ID NO: 2140580 - DNA, 15 bp, Homo sapiens
ctctgaaacacccca

SEQ ID NO: 2140581 - DNA, 15 bp, Homo sapiens
tctgaaacaccccaa

SEQ ID NO: 2140582 - DNA, 15 bp, Homo sapiens
ctgaaacaccccaat

SEQ ID NO: 2140583 - DNA, 15 bp, Homo sapiens
tgaaacaccccaatc

SEQ ID NO: 2140584 - DNA, 15 bp, Homo sapiens
gaaacaccccaatct

SEQ ID NO: 2140585 - DNA, 15 bp, Homo sapiens
aaacaccccaatctc

SEQ ID NO: 2140586 - DNA, 15 bp, Homo sapiens
aacaccccaatctca

SEQ ID NO: 2140587 - DNA, 15 bp, Homo sapiens
acaccccaatctcat

SEQ ID NO: 2140588 - DNA, 15 bp, Homo sapiens
caccccaatctcatt

SEQ ID NO: 2140589 - DNA, 15 bp, Homo sapiens
accccaatctcattt

SEQ ID NO: 2140590 - DNA, 15 bp, Homo sapiens
ccccaatctcatttt

SEQ ID NO: 2140591 - DNA, 15 bp, Homo sapiens
cccaatctcattttt

SEQ ID NO: 2140592 - DNA, 15 bp, Homo sapiens
ccaatctcattttta

SEQ ID NO: 2140593 - DNA, 15 bp, Homo sapiens
caatctcatttttat

SEQ ID NO: 2140594 - DNA, 15 bp, Homo sapiens
aatctcatttttata

SEQ ID NO: 2140595 - DNA, 15 bp, Homo sapiens
atctcatttttatag

SEQ ID NO: 2140596 - DNA, 15 bp, Homo sapiens
tctcatttttataga

SEQ ID NO: 2140597 - DNA, 15 bp, Homo sapiens
ctcatttttatagag

SEQ ID NO: 2140598 - DNA, 15 bp, Homo sapiens
tcatttttatagagc

SEQ ID NO: 2140599 - DNA, 15 bp, Homo sapiens
catttttatagagct

SEQ ID NO: 2140600 - DNA, 15 bp, Homo sapiens
atttttatagagcta

SEQ ID NO: 2140601 - DNA, 15 bp, Homo sapiens
tttttatagagctaa

SEQ ID NO: 2140602 - DNA, 15 bp, Homo sapiens
ttttatagagctaaa

SEQ ID NO: 2140603 - DNA, 15 bp, Homo sapiens
tttatagagctaaac

SEQ ID NO: 2140604 - DNA, 15 bp, Homo sapiens
ttatagagctaaact

SEQ ID NO: 2140605 - DNA, 15 bp, Homo sapiens
tatagagctaaactt

SEQ ID NO: 2140606 - DNA, 15 bp, Homo sapiens
atagagctaaacttt

SEQ ID NO: 2140607 - DNA, 15 bp, Homo sapiens
tagagctaaacttta

SEQ ID NO: 2140608 - DNA, 15 bp, Homo sapiens
agagctaaactttat

SEQ ID NO: 2140609 - DNA, 15 bp, Homo sapiens
gagctaaactttata

SEQ ID NO: 2140610 - DNA, 15 bp, Homo sapiens
agctaaactttatat

SEQ ID NO: 2140611 - DNA, 15 bp, Homo sapiens
gctaaactttatata

SEQ ID NO: 2140612 - DNA, 15 bp, Homo sapiens
ctaaactttatataa

SEQ ID NO: 2140613 - DNA, 15 bp, Homo sapiens
taaactttatataag

SEQ ID NO: 2140614 - DNA, 15 bp, Homo sapiens
aaactttatataagt

SEQ ID NO: 2140615 - DNA, 15 bp, Homo sapiens
aactttatataagta

SEQ ID NO: 2140616 - DNA, 15 bp, Homo sapiens
actttatataagtag

SEQ ID NO: 2140617 - DNA, 15 bp, Homo sapiens
ctttatataagtaga

SEQ ID NO: 2140618 - DNA, 15 bp, Homo sapiens
tttatataagtagag

SEQ ID NO: 2140619 - DNA, 15 bp, Homo sapiens
ttatataagtagagc

SEQ ID NO: 2140620 - DNA, 15 bp, Homo sapiens
tatataagtagagct

SEQ ID NO: 2140621 - DNA, 15 bp, Homo sapiens
atataagtagagctg

SEQ ID NO: 2140622 - DNA, 15 bp, Homo sapiens
tataagtagagctgt

SEQ ID NO: 2140623 - DNA, 15 bp, Homo sapiens
ataagtagagctgtc

SEQ ID NO: 2140624 - DNA, 15 bp, Homo sapiens
taagtagagctgtct

SEQ ID NO: 2140625 - DNA, 15 bp, Homo sapiens
aagtagagctgtcta

SEQ ID NO: 2140626 - DNA, 15 bp, Homo sapiens
agtagagctgtctag

SEQ ID NO: 2140627 - DNA, 15 bp, Homo sapiens
gtagagctgtctagt

SEQ ID NO: 2140628 - DNA, 15 bp, Homo sapiens
tagagctgtctagtg

SEQ ID NO: 2140629 - DNA, 15 bp, Homo sapiens
agagctgtctagtgc

SEQ ID NO: 2140630 - DNA, 15 bp, Homo sapiens
gagctgtctagtgcc

SEQ ID NO: 2140631 - DNA, 15 bp, Homo sapiens
agctgtctagtgcct

SEQ ID NO: 2140632 - DNA, 15 bp, Homo sapiens
gctgtctagtgcctg

SEQ ID NO: 2140633 - DNA, 15 bp, Homo sapiens
ctgtctagtgcctgt

SEQ ID NO: 2140634 - DNA, 15 bp, Homo sapiens
tgtctagtgcctgtg

SEQ ID NO: 2140635 - DNA, 15 bp, Homo sapiens
gtctagtgcctgtgt

SEQ ID NO: 2140636 - DNA, 15 bp, Homo sapiens
tctagtgcctgtgtg

SEQ ID NO: 2140637 - DNA, 15 bp, Homo sapiens
ctagtgcctgtgtgg

SEQ ID NO: 2140638 - DNA, 15 bp, Homo sapiens
tagtgcctgtgtggt

SEQ ID NO: 2140639 - DNA, 15 bp, Homo sapiens
agtgcctgtgtggtg

SEQ ID NO: 2140640 - DNA, 15 bp, Homo sapiens
gtgcctgtgtggtgt

SEQ ID NO: 2140641 - DNA, 15 bp, Homo sapiens
tgcctgtgtggtgtg

SEQ ID NO: 2140642 - DNA, 15 bp, Homo sapiens
gcctgtgtggtgtga

SEQ ID NO: 2140643 - DNA, 15 bp, Homo sapiens
cctgtgtggtgtgat

SEQ ID NO: 2140644 - DNA, 15 bp, Homo sapiens
ctgtgtggtgtgatt

SEQ ID NO: 2140645 - DNA, 15 bp, Homo sapiens
tgtgtggtgtgattt

SEQ ID NO: 2140646 - DNA, 15 bp, Homo sapiens
gtgtggtgtgatttc

SEQ ID NO: 2140647 - DNA, 15 bp, Homo sapiens
tgtggtgtgatttca

SEQ ID NO: 2140648 - DNA, 15 bp, Homo sapiens
gtggtgtgatttcat

SEQ ID NO: 2140649 - DNA, 15 bp, Homo sapiens
tggtgtgatttcata

SEQ ID NO: 2140650 - DNA, 15 bp, Homo sapiens
ggtgtgatttcatac

SEQ ID NO: 2140651 - DNA, 15 bp, Homo sapiens
gtgtgatttcataca

SEQ ID NO: 2140652 - DNA, 15 bp, Homo sapiens
tgtgatttcatacaa

SEQ ID NO: 2140653 - DNA, 15 bp, Homo sapiens
gtgatttcatacaag

SEQ ID NO: 2140654 - DNA, 15 bp, Homo sapiens
tgatttcatacaaga

SEQ ID NO: 2140655 - DNA, 15 bp, Homo sapiens
gatttcatacaagaa

SEQ ID NO: 2140656 - DNA, 15 bp, Homo sapiens
atttcatacaagaag

SEQ ID NO: 2140657 - DNA, 15 bp, Homo sapiens
tttcatacaagaagg

SEQ ID NO: 2140658 - DNA, 15 bp, Homo sapiens
ttcatacaagaaggc

SEQ ID NO: 2140659 - DNA, 15 bp, Homo sapiens
tcatacaagaaggcc

SEQ ID NO: 2140660 - DNA, 15 bp, Homo sapiens
catacaagaaggcct

SEQ ID NO: 2140661 - DNA, 15 bp, Homo sapiens
atacaagaaggcctt

SEQ ID NO: 2140662 - DNA, 15 bp, Homo sapiens
tacaagaaggccttc

SEQ ID NO: 2140663 - DNA, 15 bp, Homo sapiens
acaagaaggccttct

SEQ ID NO: 2140664 - DNA, 15 bp, Homo sapiens
caagaaggccttctt

SEQ ID NO: 2140665 - DNA, 15 bp, Homo sapiens
aagaaggccttcttt

SEQ ID NO: 2140666 - DNA, 15 bp, Homo sapiens
agaaggccttctttc

SEQ ID NO: 2140667 - DNA, 15 bp, Homo sapiens
gaaggccttctttcc

SEQ ID NO: 2140668 - DNA, 15 bp, Homo sapiens
aaggccttctttccc

SEQ ID NO: 2140669 - DNA, 15 bp, Homo sapiens
aggccttctttccca

SEQ ID NO: 2140670 - DNA, 15 bp, Homo sapiens
ggccttctttcccaa

SEQ ID NO: 2140671 - DNA, 15 bp, Homo sapiens
gccttctttcccaag

SEQ ID NO: 2140672 - DNA, 15 bp, Homo sapiens
ccttctttcccaagc

SEQ ID NO: 2140673 - DNA, 15 bp, Homo sapiens
cttctttcccaagcc

SEQ ID NO: 2140674 - DNA, 15 bp, Homo sapiens
ttctttcccaagcct

SEQ ID NO: 2140675 - DNA, 15 bp, Homo sapiens
tctttcccaagccta

SEQ ID NO: 2140676 - DNA, 15 bp, Homo sapiens
ctttcccaagcctat

SEQ ID NO: 2140677 - DNA, 15 bp, Homo sapiens
tttcccaagcctata

SEQ ID NO: 2140678 - DNA, 15 bp, Homo sapiens
ttcccaagcctatat

SEQ ID NO: 2140679 - DNA, 15 bp, Homo sapiens
tcccaagcctatatt

SEQ ID NO: 2140680 - DNA, 15 bp, Homo sapiens
cccaagcctatattt

SEQ ID NO: 2140681 - DNA, 15 bp, Homo sapiens
ccaagcctatatttt

SEQ ID NO: 2140682 - DNA, 15 bp, Homo sapiens
caagcctatattttc

SEQ ID NO: 2140683 - DNA, 15 bp, Homo sapiens
aagcctatattttcc

SEQ ID NO: 2140684 - DNA, 15 bp, Homo sapiens
agcctatattttccc

SEQ ID NO: 2140685 - DNA, 15 bp, Homo sapiens
gcctatattttccct

SEQ ID NO: 2140686 - DNA, 15 bp, Homo sapiens
cctatattttccctc

SEQ ID NO: 2140687 - DNA, 15 bp, Homo sapiens
ctatattttccctcc

SEQ ID NO: 2140688 - DNA, 15 bp, Homo sapiens
tatattttccctcct

SEQ ID NO: 2140689 - DNA, 15 bp, Homo sapiens
atattttccctcctt

SEQ ID NO: 2140690 - DNA, 15 bp, Homo sapiens
tattttccctccttg

SEQ ID NO: 2140691 - DNA, 15 bp, Homo sapiens
attttccctccttgg

SEQ ID NO: 2140692 - DNA, 15 bp, Homo sapiens
ttttccctccttggt

SEQ ID NO: 2140693 - DNA, 15 bp, Homo sapiens
tttccctccttggta

SEQ ID NO: 2140694 - DNA, 15 bp, Homo sapiens
ttccctccttggtag

SEQ ID NO: 2140695 - DNA, 15 bp, Homo sapiens
tccctccttggtagc

SEQ ID NO: 2140696 - DNA, 15 bp, Homo sapiens
ccctccttggtagct

SEQ ID NO: 2140697 - DNA, 15 bp, Homo sapiens
cctccttggtagctg

SEQ ID NO: 2140698 - DNA, 15 bp, Homo sapiens
ctccttggtagctga

SEQ ID NO: 2140699 - DNA, 15 bp, Homo sapiens
tccttggtagctgat

SEQ ID NO: 2140700 - DNA, 15 bp, Homo sapiens
ccttggtagctgatg

SEQ ID NO: 2140701 - DNA, 15 bp, Homo sapiens
cttggtagctgatgt

SEQ ID NO: 2140702 - DNA, 15 bp, Homo sapiens
ttggtagctgatgtc

SEQ ID NO: 2140703 - DNA, 15 bp, Homo sapiens
tggtagctgatgtct

SEQ ID NO: 2140704 - DNA, 15 bp, Homo sapiens
ggtagctgatgtctg

SEQ ID NO: 2140705 - DNA, 15 bp, Homo sapiens
gtagctgatgtctga

SEQ ID NO: 2140706 - DNA, 15 bp, Homo sapiens
tagctgatgtctgaa

SEQ ID NO: 2140707 - DNA, 15 bp, Homo sapiens
agctgatgtctgaaa

SEQ ID NO: 2140708 - DNA, 15 bp, Homo sapiens
gctgatgtctgaaat

SEQ ID NO: 2140709 - DNA, 15 bp, Homo sapiens
ctgatgtctgaaatt

SEQ ID NO: 2140710 - DNA, 15 bp, Homo sapiens
tgatgtctgaaattc

SEQ ID NO: 2140711 - DNA, 15 bp, Homo sapiens
gatgtctgaaattct

SEQ ID NO: 2140712 - DNA, 15 bp, Homo sapiens
atgtctgaaattctg

SEQ ID NO: 2140713 - DNA, 15 bp, Homo sapiens
tgtctgaaattctgt

SEQ ID NO: 2140714 - DNA, 15 bp, Homo sapiens
gtctgaaattctgtt

SEQ ID NO: 2140715 - DNA, 15 bp, Homo sapiens
tctgaaattctgtta

SEQ ID NO: 2140716 - DNA, 15 bp, Homo sapiens
ctgaaattctgttat

SEQ ID NO: 2140717 - DNA, 15 bp, Homo sapiens
tgaaattctgttatc

SEQ ID NO: 2140718 - DNA, 15 bp, Homo sapiens
gaaattctgttatct

SEQ ID NO: 2140719 - DNA, 15 bp, Homo sapiens
aaattctgttatctg

SEQ ID NO: 2140720 - DNA, 15 bp, Homo sapiens
aattctgttatctgg

SEQ ID NO: 2140721 - DNA, 15 bp, Homo sapiens
attctgttatctgga

SEQ ID NO: 2140722 - DNA, 15 bp, Homo sapiens
ttctgttatctggag

SEQ ID NO: 2140723 - DNA, 15 bp, Homo sapiens
tctgttatctggaga

SEQ ID NO: 2140724 - DNA, 15 bp, Homo sapiens
ctgttatctggagac

SEQ ID NO: 2140725 - DNA, 15 bp, Homo sapiens
tgttatctggagacg

SEQ ID NO: 2140726 - DNA, 15 bp, Homo sapiens
gttatctggagacga

SEQ ID NO: 2140727 - DNA, 15 bp, Homo sapiens
ttatctggagacgaa

SEQ ID NO: 2140728 - DNA, 15 bp, Homo sapiens
tatctggagacgaat

SEQ ID NO: 2140729 - DNA, 15 bp, Homo sapiens
atctggagacgaatc

SEQ ID NO: 2140730 - DNA, 15 bp, Homo sapiens
tctggagacgaatct

SEQ ID NO: 2140731 - DNA, 15 bp, Homo sapiens
ctggagacgaatctt

SEQ ID NO: 2140732 - DNA, 15 bp, Homo sapiens
tggagacgaatcttt

SEQ ID NO: 2140733 - DNA, 15 bp, Homo sapiens
ggagacgaatctttg

SEQ ID NO: 2140734 - DNA, 15 bp, Homo sapiens
gagacgaatctttga

SEQ ID NO: 2140735 - DNA, 15 bp, Homo sapiens
agacgaatctttgat

SEQ ID NO: 2140736 - DNA, 15 bp, Homo sapiens
gacgaatctttgatt

SEQ ID NO: 2140737 - DNA, 15 bp, Homo sapiens
acgaatctttgattc

SEQ ID NO: 2140738 - DNA, 15 bp, Homo sapiens
cgaatctttgattct

SEQ ID NO: 2140739 - DNA, 15 bp, Homo sapiens
gaatctttgattcta

SEQ ID NO: 2140740 - DNA, 15 bp, Homo sapiens
aatctttgattctac

SEQ ID NO: 2140741 - DNA, 15 bp, Homo sapiens
atctttgattctaca

SEQ ID NO: 2140742 - DNA, 15 bp, Homo sapiens
tctttgattctacat

SEQ ID NO: 2140743 - DNA, 15 bp, Homo sapiens
ctttgattctacatt

SEQ ID NO: 2140744 - DNA, 15 bp, Homo sapiens
tttgattctacatta

SEQ ID NO: 2140745 - DNA, 15 bp, Homo sapiens
ttgattctacattaa

SEQ ID NO: 2140746 - DNA, 15 bp, Homo sapiens
tgattctacattaag

SEQ ID NO: 2140747 - DNA, 15 bp, Homo sapiens
gattctacattaagt

SEQ ID NO: 2140748 - DNA, 15 bp, Homo sapiens
attctacattaagtg

SEQ ID NO: 2140749 - DNA, 15 bp, Homo sapiens
ttctacattaagtga

SEQ ID NO: 2140750 - DNA, 15 bp, Homo sapiens
tctacattaagtgat

SEQ ID NO: 2140751 - DNA, 15 bp, Homo sapiens
ctacattaagtgata

SEQ ID NO: 2140752 - DNA, 15 bp, Homo sapiens
tacattaagtgataa

SEQ ID NO: 2140753 - DNA, 15 bp, Homo sapiens
acattaagtgataaa

SEQ ID NO: 2140754 - DNA, 15 bp, Homo sapiens
cattaagtgataaag

SEQ ID NO: 2140755 - DNA, 15 bp, Homo sapiens
attaagtgataaagc

SEQ ID NO: 2140756 - DNA, 15 bp, Homo sapiens
ttaagtgataaagca

SEQ ID NO: 2140757 - DNA, 15 bp, Homo sapiens
taagtgataaagcag

SEQ ID NO: 2140758 - DNA, 15 bp, Homo sapiens
aagtgataaagcagg

SEQ ID NO: 2140759 - DNA, 15 bp, Homo sapiens
agtgataaagcaggg

SEQ ID NO: 2140760 - DNA, 15 bp, Homo sapiens
gtgataaagcaggga

SEQ ID NO: 2140761 - DNA, 15 bp, Homo sapiens
tgataaagcagggac

SEQ ID NO: 2140762 - DNA, 15 bp, Homo sapiens
gataaagcagggaca

SEQ ID NO: 2140763 - DNA, 15 bp, Homo sapiens
ataaagcagggacaa

SEQ ID NO: 2140764 - DNA, 15 bp, Homo sapiens
taaagcagggacaag

SEQ ID NO: 2140765 - DNA, 15 bp, Homo sapiens
aaagcagggacaagt

SEQ ID NO: 2140766 - DNA, 15 bp, Homo sapiens
aagcagggacaagtt

SEQ ID NO: 2140767 - DNA, 15 bp, Homo sapiens
agcagggacaagttt

SEQ ID NO: 2140768 - DNA, 15 bp, Homo sapiens
gcagggacaagttta

SEQ ID NO: 2140769 - DNA, 15 bp, Homo sapiens
cagggacaagtttat

SEQ ID NO: 2140770 - DNA, 15 bp, Homo sapiens
agggacaagtttatt

SEQ ID NO: 2140771 - DNA, 15 bp, Homo sapiens
gggacaagtttattt

SEQ ID NO: 2140772 - DNA, 15 bp, Homo sapiens
ggacaagtttatttt

SEQ ID NO: 2140773 - DNA, 15 bp, Homo sapiens
gacaagtttattttt

SEQ ID NO: 2140774 - DNA, 15 bp, Homo sapiens
acaagtttatttttg

SEQ ID NO: 2140775 - DNA, 15 bp, Homo sapiens
caagtttatttttgt

SEQ ID NO: 2140776 - DNA, 15 bp, Homo sapiens
aagtttatttttgta

SEQ ID NO: 2140777 - DNA, 15 bp, Homo sapiens
agtttatttttgtac

SEQ ID NO: 2140778 - DNA, 15 bp, Homo sapiens
gtttatttttgtacc

SEQ ID NO: 2140779 - DNA, 15 bp, Homo sapiens
tttatttttgtacct

SEQ ID NO: 2140780 - DNA, 15 bp, Homo sapiens
ttatttttgtaccta

SEQ ID NO: 2140781 - DNA, 15 bp, Homo sapiens
tatttttgtacctaa

SEQ ID NO: 2140782 - DNA, 15 bp, Homo sapiens
atttttgtacctaac

SEQ ID NO: 2140783 - DNA, 15 bp, Homo sapiens
tttttgtacctaaca

SEQ ID NO: 2140784 - DNA, 15 bp, Homo sapiens
ttttgtacctaacaa

SEQ ID NO: 2140785 - DNA, 15 bp, Homo sapiens
tttgtacctaacaaa

SEQ ID NO: 2140786 - DNA, 15 bp, Homo sapiens
ttgtacctaacaaaa

SEQ ID NO: 2140787 - DNA, 15 bp, Homo sapiens
tgtacctaacaaaag

SEQ ID NO: 2140788 - DNA, 15 bp, Homo sapiens
gtacctaacaaaagt

SEQ ID NO: 2140789 - DNA, 15 bp, Homo sapiens
tacctaacaaaagta

SEQ ID NO: 2140790 - DNA, 15 bp, Homo sapiens
acctaacaaaagtac

SEQ ID NO: 2140791 - DNA, 15 bp, Homo sapiens
cctaacaaaagtacc

SEQ ID NO: 2140792 - DNA, 15 bp, Homo sapiens
ctaacaaaagtacct

SEQ ID NO: 2140793 - DNA, 15 bp, Homo sapiens
taacaaaagtacctt

SEQ ID NO: 2140794 - DNA, 15 bp, Homo sapiens
aacaaaagtaccttt

SEQ ID NO: 2140795 - DNA, 15 bp, Homo sapiens
acaaaagtacctttc

SEQ ID NO: 2140796 - DNA, 15 bp, Homo sapiens
caaaagtacctttct

SEQ ID NO: 2140797 - DNA, 15 bp, Homo sapiens
aaaagtacctttctc

SEQ ID NO: 2140798 - DNA, 15 bp, Homo sapiens
aaagtacctttctca

SEQ ID NO: 2140799 - DNA, 15 bp, Homo sapiens
aagtacctttctcat

SEQ ID NO: 2140800 - DNA, 15 bp, Homo sapiens
agtacctttctcata

SEQ ID NO: 2140801 - DNA, 15 bp, Homo sapiens
gtacctttctcatag

SEQ ID NO: 2140802 - DNA, 15 bp, Homo sapiens
tacctttctcatagt

SEQ ID NO: 2140803 - DNA, 15 bp, Homo sapiens
acctttctcatagtg

SEQ ID NO: 2140804 - DNA, 15 bp, Homo sapiens
cctttctcatagtgg

SEQ ID NO: 2140805 - DNA, 15 bp, Homo sapiens
ctttctcatagtgga

SEQ ID NO: 2140806 - DNA, 15 bp, Homo sapiens
tttctcatagtggaa

SEQ ID NO: 2140807 - DNA, 15 bp, Homo sapiens
ttctcatagtggaaa

SEQ ID NO: 2140808 - DNA, 15 bp, Homo sapiens
tctcatagtggaaaa

SEQ ID NO: 2140809 - DNA, 15 bp, Homo sapiens
ctcatagtggaaaat

SEQ ID NO: 2140810 - DNA, 15 bp, Homo sapiens
tcatagtggaaaatg

SEQ ID NO: 2140811 - DNA, 15 bp, Homo sapiens
catagtggaaaatgc

SEQ ID NO: 2140812 - DNA, 15 bp, Homo sapiens
atagtggaaaatgcc

SEQ ID NO: 2140813 - DNA, 15 bp, Homo sapiens
tagtggaaaatgcct

SEQ ID NO: 2140814 - DNA, 15 bp, Homo sapiens
agtggaaaatgcctg

SEQ ID NO: 2140815 - DNA, 15 bp, Homo sapiens
gtggaaaatgcctgt

SEQ ID NO: 2140816 - DNA, 15 bp, Homo sapiens
tggaaaatgcctgtc

SEQ ID NO: 2140817 - DNA, 15 bp, Homo sapiens
ggaaaatgcctgtca

SEQ ID NO: 2140818 - DNA, 15 bp, Homo sapiens
gaaaatgcctgtcaa

SEQ ID NO: 2140819 - DNA, 15 bp, Homo sapiens
aaaatgcctgtcaaa

SEQ ID NO: 2140820 - DNA, 15 bp, Homo sapiens
aaatgcctgtcaaat

SEQ ID NO: 2140821 - DNA, 15 bp, Homo sapiens
aatgcctgtcaaatt

SEQ ID NO: 2140822 - DNA, 15 bp, Homo sapiens
atgcctgtcaaattt

SEQ ID NO: 2140823 - DNA, 15 bp, Homo sapiens
tgcctgtcaaatttt

SEQ ID NO: 2140824 - DNA, 15 bp, Homo sapiens
gcctgtcaaattttt

SEQ ID NO: 2140825 - DNA, 15 bp, Homo sapiens
cctgtcaaatttttt

SEQ ID NO: 2140826 - DNA, 15 bp, Homo sapiens
ctgtcaaattttttg

SEQ ID NO: 2140827 - DNA, 15 bp, Homo sapiens
tgtcaaattttttgg

SEQ ID NO: 2140828 - DNA, 15 bp, Homo sapiens
gtcaaattttttgga

SEQ ID NO: 2140829 - DNA, 15 bp, Homo sapiens
tcaaattttttggaa

SEQ ID NO: 2140830 - DNA, 15 bp, Homo sapiens
caaattttttggaat

SEQ ID NO: 2140831 - DNA, 15 bp, Homo sapiens
aaattttttggaatt

SEQ ID NO: 2140832 - DNA, 15 bp, Homo sapiens
aattttttggaatta

SEQ ID NO: 2140833 - DNA, 15 bp, Homo sapiens
attttttggaattat

SEQ ID NO: 2140834 - DNA, 15 bp, Homo sapiens
ttttttggaattata

SEQ ID NO: 2140835 - DNA, 15 bp, Homo sapiens
tttttggaattatat

SEQ ID NO: 2140836 - DNA, 15 bp, Homo sapiens
ttttggaattatatt

SEQ ID NO: 2140837 - DNA, 15 bp, Homo sapiens
tttggaattatattt

SEQ ID NO: 2140838 - DNA, 15 bp, Homo sapiens
ttggaattatattta

SEQ ID NO: 2140839 - DNA, 15 bp, Homo sapiens
tggaattatatttaa

SEQ ID NO: 2140840 - DNA, 15 bp, Homo sapiens
ggaattatatttaaa

SEQ ID NO: 2140841 - DNA, 15 bp, Homo sapiens
gaattatatttaaac

SEQ ID NO: 2140842 - DNA, 15 bp, Homo sapiens
aattatatttaaact

SEQ ID NO: 2140843 - DNA, 15 bp, Homo sapiens
attatatttaaactt

SEQ ID NO: 2140844 - DNA, 15 bp, Homo sapiens
ttatatttaaacttc

SEQ ID NO: 2140845 - DNA, 15 bp, Homo sapiens
tatatttaaacttca

SEQ ID NO: 2140846 - DNA, 15 bp, Homo sapiens
atatttaaacttcag

SEQ ID NO: 2140847 - DNA, 15 bp, Homo sapiens
tatttaaacttcagg

SEQ ID NO: 2140848 - DNA, 15 bp, Homo sapiens
atttaaacttcagga

SEQ ID NO: 2140849 - DNA, 15 bp, Homo sapiens
tttaaacttcaggac

SEQ ID NO: 2140850 - DNA, 15 bp, Homo sapiens
ttaaacttcaggacc

SEQ ID NO: 2140851 - DNA, 15 bp, Homo sapiens
taaacttcaggaccc

SEQ ID NO: 2140852 - DNA, 15 bp, Homo sapiens
aaacttcaggaccct

SEQ ID NO: 2140853 - DNA, 15 bp, Homo sapiens
aacttcaggaccctc

SEQ ID NO: 2140854 - DNA, 15 bp, Homo sapiens
acttcaggaccctct

SEQ ID NO: 2140855 - DNA, 15 bp, Homo sapiens
cttcaggaccctcta

SEQ ID NO: 2140856 - DNA, 15 bp, Homo sapiens
ttcaggaccctctag

SEQ ID NO: 2140857 - DNA, 15 bp, Homo sapiens
tcaggaccctctagg

SEQ ID NO: 2140858 - DNA, 15 bp, Homo sapiens
caggaccctctagga

SEQ ID NO: 2140859 - DNA, 15 bp, Homo sapiens
aggaccctctaggaa

SEQ ID NO: 2140860 - DNA, 15 bp, Homo sapiens
ggaccctctaggaaa

SEQ ID NO: 2140861 - DNA, 15 bp, Homo sapiens
gaccctctaggaaag

SEQ ID NO: 2140862 - DNA, 15 bp, Homo sapiens
accctctaggaaaga

SEQ ID NO: 2140863 - DNA, 15 bp, Homo sapiens
ccctctaggaaagaa

SEQ ID NO: 2140864 - DNA, 15 bp, Homo sapiens
cctctaggaaagaaa

SEQ ID NO: 2140865 - DNA, 15 bp, Homo sapiens
ctctaggaaagaaaa

SEQ ID NO: 2140866 - DNA, 15 bp, Homo sapiens
tctaggaaagaaaac

SEQ ID NO: 2140867 - DNA, 15 bp, Homo sapiens
ctaggaaagaaaaca

SEQ ID NO: 2140868 - DNA, 15 bp, Homo sapiens
taggaaagaaaacaa

SEQ ID NO: 2140869 - DNA, 15 bp, Homo sapiens
aggaaagaaaacaag

SEQ ID NO: 2140870 - DNA, 15 bp, Homo sapiens
gaaagaaaacaagac

SEQ ID NO: 2140871 - DNA, 15 bp, Homo sapiens
aaagaaaacaagact

SEQ ID NO: 2140872 - DNA, 15 bp, Homo sapiens
aagaaaacaagactt

SEQ ID NO: 2140873 - DNA, 15 bp, Homo sapiens
agaaaacaagacttc

SEQ ID NO: 2140874 - DNA, 15 bp, Homo sapiens
gaaaacaagacttcc

SEQ ID NO: 2140875 - DNA, 15 bp, Homo sapiens
aaaacaagacttcca

SEQ ID NO: 2140876 - DNA, 15 bp, Homo sapiens
aaacaagacttccat

SEQ ID NO: 2140877 - DNA, 15 bp, Homo sapiens
aacaagacttccatt

SEQ ID NO: 2140878 - DNA, 15 bp, Homo sapiens
acaagacttccattt

SEQ ID NO: 2140879 - DNA, 15 bp, Homo sapiens
caagacttccatttc

SEQ ID NO: 2140880 - DNA, 15 bp, Homo sapiens
aagacttccatttca

SEQ ID NO: 2140881 - DNA, 15 bp, Homo sapiens
agacttccatttcac

SEQ ID NO: 2140882 - DNA, 15 bp, Homo sapiens
gacttccatttcaca

SEQ ID NO: 2140883 - DNA, 15 bp, Homo sapiens
acttccatttcacac

SEQ ID NO: 2140884 - DNA, 15 bp, Homo sapiens
cttccatttcacact

SEQ ID NO: 2140885 - DNA, 15 bp, Homo sapiens
ttccatttcacactt

SEQ ID NO: 2140886 - DNA, 15 bp, Homo sapiens
tccatttcacactta

SEQ ID NO: 2140887 - DNA, 15 bp, Homo sapiens
ccatttcacacttaa

SEQ ID NO: 2140888 - DNA, 15 bp, Homo sapiens
catttcacacttaag

SEQ ID NO: 2140889 - DNA, 15 bp, Homo sapiens
atttcacacttaagg

SEQ ID NO: 2140890 - DNA, 15 bp, Homo sapiens
tttcacacttaaggc

SEQ ID NO: 2140891 - DNA, 15 bp, Homo sapiens
ttcacacttaaggca

SEQ ID NO: 2140892 - DNA, 15 bp, Homo sapiens
tcacacttaaggcaa

SEQ ID NO: 2140893 - DNA, 15 bp, Homo sapiens
cacacttaaggcaag

SEQ ID NO: 2140894 - DNA, 15 bp, Homo sapiens
acacttaaggcaaga

SEQ ID NO: 2140895 - DNA, 15 bp, Homo sapiens
cacttaaggcaagat

SEQ ID NO: 2140896 - DNA, 15 bp, Homo sapiens
acttaaggcaagatc

SEQ ID NO: 2140897 - DNA, 15 bp, Homo sapiens
cttaaggcaagatca

SEQ ID NO: 2140898 - DNA, 15 bp, Homo sapiens
ttaaggcaagatcag

SEQ ID NO: 2140899 - DNA, 15 bp, Homo sapiens
taaggcaagatcagc

SEQ ID NO: 2140900 - DNA, 15 bp, Homo sapiens
aaggcaagatcagct

SEQ ID NO: 2140901 - DNA, 15 bp, Homo sapiens
aggcaagatcagcta

SEQ ID NO: 2140902 - DNA, 15 bp, Homo sapiens
ggcaagatcagctaa

SEQ ID NO: 2140903 - DNA, 15 bp, Homo sapiens
gcaagatcagctaat

SEQ ID NO: 2140904 - DNA, 15 bp, Homo sapiens
caagatcagctaata

SEQ ID NO: 2140905 - DNA, 15 bp, Homo sapiens
aagatcagctaatac

SEQ ID NO: 2140906 - DNA, 15 bp, Homo sapiens
agatcagctaatacc

SEQ ID NO: 2140907 - DNA, 15 bp, Homo sapiens
gatcagctaatacca

SEQ ID NO: 2140908 - DNA, 15 bp, Homo sapiens
atcagctaataccat

SEQ ID NO: 2140909 - DNA, 15 bp, Homo sapiens
tcagctaataccata

SEQ ID NO: 2140910 - DNA, 15 bp, Homo sapiens
cagctaataccataa

SEQ ID NO: 2140911 - DNA, 15 bp, Homo sapiens
agctaataccataat

SEQ ID NO: 2140912 - DNA, 15 bp, Homo sapiens
gctaataccataata

SEQ ID NO: 2140913 - DNA, 15 bp, Homo sapiens
ctaataccataatat

SEQ ID NO: 2140914 - DNA, 15 bp, Homo sapiens
taataccataatatg

SEQ ID NO: 2140915 - DNA, 15 bp, Homo sapiens
aataccataatatgg

SEQ ID NO: 2140916 - DNA, 15 bp, Homo sapiens
ataccataatatggg

SEQ ID NO: 2140917 - DNA, 15 bp, Homo sapiens
taccataatatgggt

SEQ ID NO: 2140918 - DNA, 15 bp, Homo sapiens
accataatatgggtg

SEQ ID NO: 2140919 - DNA, 15 bp, Homo sapiens
ccataatatgggtgg

SEQ ID NO: 2140920 - DNA, 15 bp, Homo sapiens
cataatatgggtgga

SEQ ID NO: 2140921 - DNA, 15 bp, Homo sapiens
ataatatgggtggat

SEQ ID NO: 2140922 - DNA, 15 bp, Homo sapiens
taatatgggtggatg

SEQ ID NO: 2140923 - DNA, 15 bp, Homo sapiens
aatatgggtggatgc

SEQ ID NO: 2140924 - DNA, 15 bp, Homo sapiens
atatgggtggatgcc

SEQ ID NO: 2140925 - DNA, 15 bp, Homo sapiens
tatgggtggatgcca

SEQ ID NO: 2140926 - DNA, 15 bp, Homo sapiens
atgggtggatgccac

SEQ ID NO: 2140927 - DNA, 15 bp, Homo sapiens
tgggtggatgccaca

SEQ ID NO: 2140928 - DNA, 15 bp, Homo sapiens
gggtggatgccacag

SEQ ID NO: 2140929 - DNA, 15 bp, Homo sapiens
ggtggatgccacagt

SEQ ID NO: 2140930 - DNA, 15 bp, Homo sapiens
gtggatgccacagtt

SEQ ID NO: 2140931 - DNA, 15 bp, Homo sapiens
tggatgccacagttt

SEQ ID NO: 2140932 - DNA, 15 bp, Homo sapiens
ggatgccacagtttt

SEQ ID NO: 2140933 - DNA, 15 bp, Homo sapiens
gatgccacagttttt

SEQ ID NO: 2140934 - DNA, 15 bp, Homo sapiens
atgccacagtttttt

SEQ ID NO: 2140935 - DNA, 15 bp, Homo sapiens
tgccacagttttttt

SEQ ID NO: 2140936 - DNA, 15 bp, Homo sapiens
gccacagtttttttc

SEQ ID NO: 2140937 - DNA, 15 bp, Homo sapiens
ccacagtttttttcc

SEQ ID NO: 2140938 - DNA, 15 bp, Homo sapiens
cacagtttttttcca

SEQ ID NO: 2140939 - DNA, 15 bp, Homo sapiens
acagtttttttccaa

SEQ ID NO: 2140940 - DNA, 15 bp, Homo sapiens
cagtttttttccaac

SEQ ID NO: 2140941 - DNA, 15 bp, Homo sapiens
agtttttttccaact

SEQ ID NO: 2140942 - DNA, 15 bp, Homo sapiens
gtttttttccaactc

SEQ ID NO: 2140943 - DNA, 15 bp, Homo sapiens
tttttttccaactcg

SEQ ID NO: 2140944 - DNA, 15 bp, Homo sapiens
ttttttccaactcgt

SEQ ID NO: 2140945 - DNA, 15 bp, Homo sapiens
tttttccaactcgtg

SEQ ID NO: 2140946 - DNA, 15 bp, Homo sapiens
ttttccaactcgtgg

SEQ ID NO: 2140947 - DNA, 15 bp, Homo sapiens
tttccaactcgtgga

SEQ ID NO: 2140948 - DNA, 15 bp, Homo sapiens
ttccaactcgtggaa

SEQ ID NO: 2140949 - DNA, 15 bp, Homo sapiens
tccaactcgtggaaa

SEQ ID NO: 2140950 - DNA, 15 bp, Homo sapiens
ccaactcgtggaaaa

SEQ ID NO: 2140951 - DNA, 15 bp, Homo sapiens
caactcgtggaaaat

SEQ ID NO: 2140952 - DNA, 15 bp, Homo sapiens
aactcgtggaaaatt

SEQ ID NO: 2140953 - DNA, 15 bp, Homo sapiens
actcgtggaaaattt

SEQ ID NO: 2140954 - DNA, 15 bp, Homo sapiens
ctcgtggaaaatttc

SEQ ID NO: 2140955 - DNA, 15 bp, Homo sapiens
tcgtggaaaatttca

SEQ ID NO: 2140956 - DNA, 15 bp, Homo sapiens
cgtggaaaatttcat

SEQ ID NO: 2140957 - DNA, 15 bp, Homo sapiens
gtggaaaatttcatt

SEQ ID NO: 2140958 - DNA, 15 bp, Homo sapiens
tggaaaatttcatta

SEQ ID NO: 2140959 - DNA, 15 bp, Homo sapiens
ggaaaatttcattaa

SEQ ID NO: 2140960 - DNA, 15 bp, Homo sapiens
gaaaatttcattaat

SEQ ID NO: 2140961 - DNA, 15 bp, Homo sapiens
aaaatttcattaatt

SEQ ID NO: 2140962 - DNA, 15 bp, Homo sapiens
aaatttcattaatta

SEQ ID NO: 2140963 - DNA, 15 bp, Homo sapiens
aatttcattaattaa

SEQ ID NO: 2140964 - DNA, 15 bp, Homo sapiens
atttcattaattaat

SEQ ID NO: 2140965 - DNA, 15 bp, Homo sapiens
tttcattaattaatc

SEQ ID NO: 2140966 - DNA, 15 bp, Homo sapiens
ttcattaattaatca

SEQ ID NO: 2140967 - DNA, 15 bp, Homo sapiens
tcattaattaatcat

SEQ ID NO: 2140968 - DNA, 15 bp, Homo sapiens
cattaattaatcata

SEQ ID NO: 2140969 - DNA, 15 bp, Homo sapiens
attaattaatcatag

SEQ ID NO: 2140970 - DNA, 15 bp, Homo sapiens
ttaattaatcatagc

SEQ ID NO: 2140971 - DNA, 15 bp, Homo sapiens
taattaatcatagca

SEQ ID NO: 2140972 - DNA, 15 bp, Homo sapiens
aattaatcatagcat

SEQ ID NO: 2140973 - DNA, 15 bp, Homo sapiens
attaatcatagcatt

SEQ ID NO: 2140974 - DNA, 15 bp, Homo sapiens
ttaatcatagcattg

SEQ ID NO: 2140975 - DNA, 15 bp, Homo sapiens
taatcatagcattga

SEQ ID NO: 2140976 - DNA, 15 bp, Homo sapiens
aatcatagcattgat

SEQ ID NO: 2140977 - DNA, 15 bp, Homo sapiens
atcatagcattgatt

SEQ ID NO: 2140978 - DNA, 15 bp, Homo sapiens
tcatagcattgattc

SEQ ID NO: 2140979 - DNA, 15 bp, Homo sapiens
catagcattgattcc

SEQ ID NO: 2140980 - DNA, 15 bp, Homo sapiens
atagcattgattcct

SEQ ID NO: 2140981 - DNA, 15 bp, Homo sapiens
tagcattgattcctg

SEQ ID NO: 2140982 - DNA, 15 bp, Homo sapiens
agcattgattcctgt

SEQ ID NO: 2140983 - DNA, 15 bp, Homo sapiens
gcattgattcctgtt

SEQ ID NO: 2140984 - DNA, 15 bp, Homo sapiens
cattgattcctgtta

SEQ ID NO: 2140985 - DNA, 15 bp, Homo sapiens
attgattcctgttaa

SEQ ID NO: 2140986 - DNA, 15 bp, Homo sapiens
ttgattcctgttaag

SEQ ID NO: 2140987 - DNA, 15 bp, Homo sapiens
tgattcctgttaagc

SEQ ID NO: 2140988 - DNA, 15 bp, Homo sapiens
gattcctgttaagcc

SEQ ID NO: 2140989 - DNA, 15 bp, Homo sapiens
attcctgttaagcct

SEQ ID NO: 2140990 - DNA, 15 bp, Homo sapiens
ttcctgttaagccta

SEQ ID NO: 2140991 - DNA, 15 bp, Homo sapiens
tcctgttaagcctag

SEQ ID NO: 2140992 - DNA, 15 bp, Homo sapiens
cctgttaagcctagt

SEQ ID NO: 2140993 - DNA, 15 bp, Homo sapiens
ctgttaagcctagta

SEQ ID NO: 2140994 - DNA, 15 bp, Homo sapiens
tgttaagcctagtaa

SEQ ID NO: 2140995 - DNA, 15 bp, Homo sapiens
gttaagcctagtaag

SEQ ID NO: 2140996 - DNA, 15 bp, Homo sapiens
ttaagcctagtaagg

SEQ ID NO: 2140997 - DNA, 15 bp, Homo sapiens
taagcctagtaaggg

SEQ ID NO: 2140998 - DNA, 15 bp, Homo sapiens
aagcctagtaaggga

SEQ ID NO: 2140999 - DNA, 15 bp, Homo sapiens
agcctagtaagggac

SEQ ID NO: 2141000 - DNA, 15 bp, Homo sapiens
gcctagtaagggaca

SEQ ID NO: 2141001 - DNA, 15 bp, Homo sapiens
cctagtaagggacaa

SEQ ID NO: 2141002 - DNA, 15 bp, Homo sapiens
ctagtaagggacaaa

SEQ ID NO: 2141003 - DNA, 15 bp, Homo sapiens
tagtaagggacaaaa

SEQ ID NO: 2141004 - DNA, 15 bp, Homo sapiens
agtaagggacaaaaa

SEQ ID NO: 2141005 - DNA, 15 bp, Homo sapiens
gtaagggacaaaaat

SEQ ID NO: 2141006 - DNA, 15 bp, Homo sapiens
taagggacaaaaatg

SEQ ID NO: 2141007 - DNA, 15 bp, Homo sapiens
aagggacaaaaatgc

SEQ ID NO: 2141008 - DNA, 15 bp, Homo sapiens
agggacaaaaatgct

SEQ ID NO: 2141009 - DNA, 15 bp, Homo sapiens
gggacaaaaatgctc

SEQ ID NO: 2141010 - DNA, 15 bp, Homo sapiens
ggacaaaaatgctcg

SEQ ID NO: 2141011 - DNA, 15 bp, Homo sapiens
gacaaaaatgctcgt

SEQ ID NO: 2141012 - DNA, 15 bp, Homo sapiens
acaaaaatgctcgtt

SEQ ID NO: 2141013 - DNA, 15 bp, Homo sapiens
caaaaatgctcgttg

SEQ ID NO: 2141014 - DNA, 15 bp, Homo sapiens
aaaaatgctcgttgc

SEQ ID NO: 2141015 - DNA, 15 bp, Homo sapiens
aaaatgctcgttgcc

SEQ ID NO: 2141016 - DNA, 15 bp, Homo sapiens
aaatgctcgttgccc

SEQ ID NO: 2141017 - DNA, 15 bp, Homo sapiens
aatgctcgttgccca

SEQ ID NO: 2141018 - DNA, 15 bp, Homo sapiens
atgctcgttgcccac

SEQ ID NO: 2141019 - DNA, 15 bp, Homo sapiens
tgctcgttgcccacc

SEQ ID NO: 2141020 - DNA, 15 bp, Homo sapiens
gctcgttgcccacca

SEQ ID NO: 2141021 - DNA, 15 bp, Homo sapiens
ctcgttgcccaccaa

SEQ ID NO: 2141022 - DNA, 15 bp, Homo sapiens
tcgttgcccaccaaa

SEQ ID NO: 2141023 - DNA, 15 bp, Homo sapiens
cgttgcccaccaaaa

SEQ ID NO: 2141024 - DNA, 15 bp, Homo sapiens
gttgcccaccaaaat

SEQ ID NO: 2141025 - DNA, 15 bp, Homo sapiens
ttgcccaccaaaata

SEQ ID NO: 2141026 - DNA, 15 bp, Homo sapiens
tgcccaccaaaatac

SEQ ID NO: 2141027 - DNA, 15 bp, Homo sapiens
gcccaccaaaataca

SEQ ID NO: 2141028 - DNA, 15 bp, Homo sapiens
cccaccaaaatacat

SEQ ID NO: 2141029 - DNA, 15 bp, Homo sapiens
ccaccaaaatacatt

SEQ ID NO: 2141030 - DNA, 15 bp, Homo sapiens
caccaaaatacattc

SEQ ID NO: 2141031 - DNA, 15 bp, Homo sapiens
accaaaatacattct

SEQ ID NO: 2141032 - DNA, 15 bp, Homo sapiens
ccaaaatacattctc

SEQ ID NO: 2141033 - DNA, 15 bp, Homo sapiens
caaaatacattctcc

SEQ ID NO: 2141034 - DNA, 15 bp, Homo sapiens
aaaatacattctccc

SEQ ID NO: 2141035 - DNA, 15 bp, Homo sapiens
aaatacattctccca

SEQ ID NO: 2141036 - DNA, 15 bp, Homo sapiens
aatacattctcccat

SEQ ID NO: 2141037 - DNA, 15 bp, Homo sapiens
atacattctcccatt

SEQ ID NO: 2141038 - DNA, 15 bp, Homo sapiens
tacattctcccattc

SEQ ID NO: 2141039 - DNA, 15 bp, Homo sapiens
acattctcccattct

SEQ ID NO: 2141040 - DNA, 15 bp, Homo sapiens
cattctcccattctt

SEQ ID NO: 2141041 - DNA, 15 bp, Homo sapiens
attctcccattcttg

SEQ ID NO: 2141042 - DNA, 15 bp, Homo sapiens
ttctcccattcttgc

SEQ ID NO: 2141043 - DNA, 15 bp, Homo sapiens
tctcccattcttgct

SEQ ID NO: 2141044 - DNA, 15 bp, Homo sapiens
ctcccattcttgctt

SEQ ID NO: 2141045 - DNA, 15 bp, Homo sapiens
tcccattcttgcttg

SEQ ID NO: 2141046 - DNA, 15 bp, Homo sapiens
cccattcttgcttga

SEQ ID NO: 2141047 - DNA, 15 bp, Homo sapiens
ccattcttgcttgat

SEQ ID NO: 2141048 - DNA, 15 bp, Homo sapiens
cattcttgcttgatg

SEQ ID NO: 2141049 - DNA, 15 bp, Homo sapiens
attcttgcttgatgt

SEQ ID NO: 2141050 - DNA, 15 bp, Homo sapiens
ttcttgcttgatgtg

SEQ ID NO: 2141051 - DNA, 15 bp, Homo sapiens
tcttgcttgatgtgt

SEQ ID NO: 2141052 - DNA, 15 bp, Homo sapiens
cttgcttgatgtgtg

SEQ ID NO: 2141053 - DNA, 15 bp, Homo sapiens
ttgcttgatgtgtgg

SEQ ID NO: 2141054 - DNA, 15 bp, Homo sapiens
tgcttgatgtgtggc

SEQ ID NO: 2141055 - DNA, 15 bp, Homo sapiens
gcttgatgtgtggct

SEQ ID NO: 2141056 - DNA, 15 bp, Homo sapiens
cttgatgtgtggctg

SEQ ID NO: 2141057 - DNA, 15 bp, Homo sapiens
ttgatgtgtggctgc

SEQ ID NO: 2141058 - DNA, 15 bp, Homo sapiens
tgatgtgtggctgcc

SEQ ID NO: 2141059 - DNA, 15 bp, Homo sapiens
gatgtgtggctgccc

SEQ ID NO: 2141060 - DNA, 15 bp, Homo sapiens
atgtgtggctgccca

SEQ ID NO: 2141061 - DNA, 15 bp, Homo sapiens
tgtgtggctgcccag

SEQ ID NO: 2141062 - DNA, 15 bp, Homo sapiens
gtgtggctgcccagc

SEQ ID NO: 2141063 - DNA, 15 bp, Homo sapiens
tgtggctgcccagct

SEQ ID NO: 2141064 - DNA, 15 bp, Homo sapiens
gtggctgcccagcta

SEQ ID NO: 2141065 - DNA, 15 bp, Homo sapiens
tggctgcccagctag

SEQ ID NO: 2141066 - DNA, 15 bp, Homo sapiens
ggctgcccagctagg

SEQ ID NO: 2141067 - DNA, 15 bp, Homo sapiens
gctgcccagctaggg

SEQ ID NO: 2141068 - DNA, 15 bp, Homo sapiens
ctgcccagctagggt

SEQ ID NO: 2141069 - DNA, 15 bp, Homo sapiens
tgcccagctagggta

SEQ ID NO: 2141070 - DNA, 15 bp, Homo sapiens
gcccagctagggtac

SEQ ID NO: 2141071 - DNA, 15 bp, Homo sapiens
cccagctagggtaca

SEQ ID NO: 2141072 - DNA, 15 bp, Homo sapiens
ccagctagggtacat

SEQ ID NO: 2141073 - DNA, 15 bp, Homo sapiens
cagctagggtacatt

SEQ ID NO: 2141074 - DNA, 15 bp, Homo sapiens
agctagggtacattt

SEQ ID NO: 2141075 - DNA, 15 bp, Homo sapiens
gctagggtacatttt

SEQ ID NO: 2141076 - DNA, 15 bp, Homo sapiens
ctagggtacattttt

SEQ ID NO: 2141077 - DNA, 15 bp, Homo sapiens
tagggtacatttttc

SEQ ID NO: 2141078 - DNA, 15 bp, Homo sapiens
agggtacatttttca

SEQ ID NO: 2141079 - DNA, 15 bp, Homo sapiens
gggtacatttttcag

SEQ ID NO: 2141080 - DNA, 15 bp, Homo sapiens
ggtacatttttcagc

SEQ ID NO: 2141081 - DNA, 15 bp, Homo sapiens
gtacatttttcagct

SEQ ID NO: 2141082 - DNA, 15 bp, Homo sapiens
tacatttttcagctt

SEQ ID NO: 2141083 - DNA, 15 bp, Homo sapiens
acatttttcagcttc

SEQ ID NO: 2141084 - DNA, 15 bp, Homo sapiens
catttttcagcttct

SEQ ID NO: 2141085 - DNA, 15 bp, Homo sapiens
atttttcagcttctt

SEQ ID NO: 2141086 - DNA, 15 bp, Homo sapiens
tttttcagcttcttt

SEQ ID NO: 2141087 - DNA, 15 bp, Homo sapiens
ttttcagcttctttt

SEQ ID NO: 2141088 - DNA, 15 bp, Homo sapiens
tttcagcttcttttg

SEQ ID NO: 2141089 - DNA, 15 bp, Homo sapiens
ttcagcttcttttgc

SEQ ID NO: 2141090 - DNA, 15 bp, Homo sapiens
tcagcttcttttgca

SEQ ID NO: 2141091 - DNA, 15 bp, Homo sapiens
cagcttcttttgcag

SEQ ID NO: 2141092 - DNA, 15 bp, Homo sapiens
agcttcttttgcagt

SEQ ID NO: 2141093 - DNA, 15 bp, Homo sapiens
gcttcttttgcagtt

SEQ ID NO: 2141094 - DNA, 15 bp, Homo sapiens
cttcttttgcagttc

SEQ ID NO: 2141095 - DNA, 15 bp, Homo sapiens
ttcttttgcagttct

SEQ ID NO: 2141096 - DNA, 15 bp, Homo sapiens
tcttttgcagttctg

SEQ ID NO: 2141097 - DNA, 15 bp, Homo sapiens
cttttgcagttctgt

SEQ ID NO: 2141098 - DNA, 15 bp, Homo sapiens
ttttgcagttctgtg

SEQ ID NO: 2141099 - DNA, 15 bp, Homo sapiens
tttgcagttctgtgc

SEQ ID NO: 2141100 - DNA, 15 bp, Homo sapiens
ttgcagttctgtgca

SEQ ID NO: 2141101 - DNA, 15 bp, Homo sapiens
tgcagttctgtgcag

SEQ ID NO: 2141102 - DNA, 15 bp, Homo sapiens
gcagttctgtgcagc

SEQ ID NO: 2141103 - DNA, 15 bp, Homo sapiens
cagttctgtgcagcc

SEQ ID NO: 2141104 - DNA, 15 bp, Homo sapiens
agttctgtgcagcca

SEQ ID NO: 2141105 - DNA, 15 bp, Homo sapiens
gttctgtgcagccaa

SEQ ID NO: 2141106 - DNA, 15 bp, Homo sapiens
ttctgtgcagccaaa

SEQ ID NO: 2141107 - DNA, 15 bp, Homo sapiens
tctgtgcagccaaat

SEQ ID NO: 2141108 - DNA, 15 bp, Homo sapiens
ctgtgcagccaaatg

SEQ ID NO: 2141109 - DNA, 15 bp, Homo sapiens
tgtgcagccaaatga

SEQ ID NO: 2141110 - DNA, 15 bp, Homo sapiens
gtgcagccaaatgat

SEQ ID NO: 2141111 - DNA, 15 bp, Homo sapiens
tgcagccaaatgatt

SEQ ID NO: 2141112 - DNA, 15 bp, Homo sapiens
gcagccaaatgattg

SEQ ID NO: 2141113 - DNA, 15 bp, Homo sapiens
cagccaaatgattgt

SEQ ID NO: 2141114 - DNA, 15 bp, Homo sapiens
agccaaatgattgtt

SEQ ID NO: 2141115 - DNA, 15 bp, Homo sapiens
gccaaatgattgtta

SEQ ID NO: 2141116 - DNA, 15 bp, Homo sapiens
ccaaatgattgttat

SEQ ID NO: 2141117 - DNA, 15 bp, Homo sapiens
caaatgattgttatg

SEQ ID NO: 2141118 - DNA, 15 bp, Homo sapiens
aaatgattgttatga

SEQ ID NO: 2141119 - DNA, 15 bp, Homo sapiens
aatgattgttatgat

SEQ ID NO: 2141120 - DNA, 15 bp, Homo sapiens
atgattgttatgatc

SEQ ID NO: 2141121 - DNA, 15 bp, Homo sapiens
tgattgttatgatca

SEQ ID NO: 2141122 - DNA, 15 bp, Homo sapiens
gattgttatgatcaa

SEQ ID NO: 2141123 - DNA, 15 bp, Homo sapiens
attgttatgatcaat

SEQ ID NO: 2141124 - DNA, 15 bp, Homo sapiens
ttgttatgatcaata

SEQ ID NO: 2141125 - DNA, 15 bp, Homo sapiens
tgttatgatcaataa

SEQ ID NO: 2141126 - DNA, 15 bp, Homo sapiens
gttatgatcaataaa

SEQ ID NO: 2141127 - DNA, 15 bp, Homo sapiens
ttatgatcaataaaa

SEQ ID NO: 2141128 - DNA, 15 bp, Homo sapiens
tatgatcaataaaat

SEQ ID NO: 2141129 - DNA, 15 bp, Homo sapiens
atgatcaataaaatg

SEQ ID NO: 2141130 - DNA, 15 bp, Homo sapiens
tgatcaataaaatgt

SEQ ID NO: 2141131 - DNA, 15 bp, Homo sapiens
gatcaataaaatgtg

SEQ ID NO: 2141132 - DNA, 15 bp, Homo sapiens
atcaataaaatgtga

SEQ ID NO: 2141133 - DNA, 15 bp, Homo sapiens
tcaataaaatgtgag

SEQ ID NO: 2141134 - DNA, 15 bp, Homo sapiens
caataaaatgtgagt

SEQ ID NO: 2141135 - DNA, 15 bp, Homo sapiens
aataaaatgtgagta

SEQ ID NO: 2141136 - DNA, 15 bp, Homo sapiens
ataaaatgtgagtag

SEQ ID NO: 2141137 - DNA, 15 bp, Homo sapiens
taaaatgtgagtaga

SEQ ID NO: 2141138 - DNA, 15 bp, Homo sapiens
aaaatgtgagtagaa

SEQ ID NO: 2141139 - DNA, 15 bp, Homo sapiens
aaatgtgagtagaag

SEQ ID NO: 2141140 - DNA, 15 bp, Homo sapiens
aatgtgagtagaagt

SEQ ID NO: 2141141 - DNA, 15 bp, Homo sapiens
atgtgagtagaagtg

SEQ ID NO: 2141142 - DNA, 15 bp, Homo sapiens
tgtgagtagaagtga

SEQ ID NO: 2141143 - DNA, 15 bp, Homo sapiens
gtgagtagaagtgat

SEQ ID NO: 2141144 - DNA, 15 bp, Homo sapiens
tgagtagaagtgatg

SEQ ID NO: 2141145 - DNA, 15 bp, Homo sapiens
gagtagaagtgatgt

SEQ ID NO: 2141146 - DNA, 15 bp, Homo sapiens
tagaagtgatgtatg

SEQ ID NO: 2141147 - DNA, 15 bp, Homo sapiens
agaagtgatgtatgc

SEQ ID NO: 2141148 - DNA, 15 bp, Homo sapiens
gaagtgatgtatgcc

SEQ ID NO: 2141149 - DNA, 15 bp, Homo sapiens
aagtgatgtatgcca

SEQ ID NO: 2141150 - DNA, 15 bp, Homo sapiens
agtgatgtatgccat

SEQ ID NO: 2141151 - DNA, 15 bp, Homo sapiens
gtgatgtatgccatt

SEQ ID NO: 2141152 - DNA, 15 bp, Homo sapiens
tgatgtatgccattt

SEQ ID NO: 2141153 - DNA, 15 bp, Homo sapiens
gatgtatgccatttc

SEQ ID NO: 2141154 - DNA, 15 bp, Homo sapiens
atgtatgccatttcc

SEQ ID NO: 2141155 - DNA, 15 bp, Homo sapiens
tgtatgccatttcca

SEQ ID NO: 2141156 - DNA, 15 bp, Homo sapiens
gtatgccatttccat

SEQ ID NO: 2141157 - DNA, 15 bp, Homo sapiens
tatgccatttccatg

SEQ ID NO: 2141158 - DNA, 15 bp, Homo sapiens
atgccatttccatgc

SEQ ID NO: 2141159 - DNA, 15 bp, Homo sapiens
tgccatttccatgcc

SEQ ID NO: 2141160 - DNA, 15 bp, Homo sapiens
gccatttccatgcct

SEQ ID NO: 2141161 - DNA, 15 bp, Homo sapiens
ccatttccatgcctg

SEQ ID NO: 2141162 - DNA, 15 bp, Homo sapiens
catttccatgcctgg

SEQ ID NO: 2141163 - DNA, 15 bp, Homo sapiens
atttccatgcctggg

SEQ ID NO: 2141164 - DNA, 15 bp, Homo sapiens
tttccatgcctgggt

SEQ ID NO: 2141165 - DNA, 15 bp, Homo sapiens
ttccatgcctgggtc

SEQ ID NO: 2141166 - DNA, 15 bp, Homo sapiens
tccatgcctgggtcc

SEQ ID NO: 2141167 - DNA, 15 bp, Homo sapiens
ccatgcctgggtcct

SEQ ID NO: 2141168 - DNA, 15 bp, Homo sapiens
catgcctgggtccta

SEQ ID NO: 2141169 - DNA, 15 bp, Homo sapiens
atgcctgggtcctaa

SEQ ID NO: 2141170 - DNA, 15 bp, Homo sapiens
tgcctgggtcctaag

SEQ ID NO: 2141171 - DNA, 15 bp, Homo sapiens
gcctgggtcctaaga

SEQ ID NO: 2141172 - DNA, 15 bp, Homo sapiens
cctgggtcctaagac

SEQ ID NO: 2141173 - DNA, 15 bp, Homo sapiens
ctgggtcctaagaca

SEQ ID NO: 2141174 - DNA, 15 bp, Homo sapiens
tgggtcctaagacat

SEQ ID NO: 2141175 - DNA, 15 bp, Homo sapiens
gggtcctaagacata

SEQ ID NO: 2141176 - DNA, 15 bp, Homo sapiens
ggtcctaagacatag

SEQ ID NO: 2141177 - DNA, 15 bp, Homo sapiens
gtcctaagacatagg

SEQ ID NO: 2141178 - DNA, 15 bp, Homo sapiens
tcctaagacataggg

SEQ ID NO: 2141179 - DNA, 15 bp, Homo sapiens
cctaagacatagggt

SEQ ID NO: 2141180 - DNA, 15 bp, Homo sapiens
ctaagacatagggta

SEQ ID NO: 2141181 - DNA, 15 bp, Homo sapiens
taagacatagggtat

SEQ ID NO: 2141182 - DNA, 15 bp, Homo sapiens
aagacatagggtatg

SEQ ID NO: 2141183 - DNA, 15 bp, Homo sapiens
agacatagggtatgc

SEQ ID NO: 2141184 - DNA, 15 bp, Homo sapiens
gacatagggtatgct

SEQ ID NO: 2141185 - DNA, 15 bp, Homo sapiens
acatagggtatgctc

SEQ ID NO: 2141186 - DNA, 15 bp, Homo sapiens
catagggtatgctct

SEQ ID NO: 2141187 - DNA, 15 bp, Homo sapiens
atagggtatgctctc

SEQ ID NO: 2141188 - DNA, 15 bp, Homo sapiens
tagggtatgctctcc

SEQ ID NO: 2141189 - DNA, 15 bp, Homo sapiens
agggtatgctctcct

SEQ ID NO: 2141190 - DNA, 15 bp, Homo sapiens
gggtatgctctcctt

SEQ ID NO: 2141191 - DNA, 15 bp, Homo sapiens
ggtatgctctccttt

SEQ ID NO: 2141192 - DNA, 15 bp, Homo sapiens
gtatgctctcctttc

SEQ ID NO: 2141193 - DNA, 15 bp, Homo sapiens
tatgctctcctttcc

SEQ ID NO: 2141194 - DNA, 15 bp, Homo sapiens
atgctctcctttcca

SEQ ID NO: 2141195 - DNA, 15 bp, Homo sapiens
tgctctcctttccat

SEQ ID NO: 2141196 - DNA, 15 bp, Homo sapiens
gctctcctttccata

SEQ ID NO: 2141197 - DNA, 15 bp, Homo sapiens
ctctcctttccatac

SEQ ID NO: 2141198 - DNA, 15 bp, Homo sapiens
tctcctttccatact

SEQ ID NO: 2141199 - DNA, 15 bp, Homo sapiens
ctcctttccatactt

SEQ ID NO: 2141200 - DNA, 15 bp, Homo sapiens
tcctttccatacttt

SEQ ID NO: 2141201 - DNA, 15 bp, Homo sapiens
cctttccatactttc

SEQ ID NO: 2141202 - DNA, 15 bp, Homo sapiens
ctttccatactttct

SEQ ID NO: 2141203 - DNA, 15 bp, Homo sapiens
tttccatactttctc

SEQ ID NO: 2141204 - DNA, 15 bp, Homo sapiens
ttccatactttctcc

SEQ ID NO: 2141205 - DNA, 15 bp, Homo sapiens
tccatactttctccc

SEQ ID NO: 2141206 - DNA, 15 bp, Homo sapiens
ccatactttctccca

SEQ ID NO: 2141207 - DNA, 15 bp, Homo sapiens
catactttctcccac

SEQ ID NO: 2141208 - DNA, 15 bp, Homo sapiens
atactttctcccacc

SEQ ID NO: 2141209 - DNA, 15 bp, Homo sapiens
tactttctcccacca

SEQ ID NO: 2141210 - DNA, 15 bp, Homo sapiens
actttctcccaccag

SEQ ID NO: 2141211 - DNA, 15 bp, Homo sapiens
ctttctcccaccagc

SEQ ID NO: 2141212 - DNA, 15 bp, Homo sapiens
tttctcccaccagct

SEQ ID NO: 2141213 - DNA, 15 bp, Homo sapiens
ttctcccaccagctg

SEQ ID NO: 2141214 - DNA, 15 bp, Homo sapiens
tctcccaccagctgc

SEQ ID NO: 2141215 - DNA, 15 bp, Homo sapiens
ctcccaccagctgca

SEQ ID NO: 2141216 - DNA, 15 bp, Homo sapiens
tcccaccagctgcaa

SEQ ID NO: 2141217 - DNA, 15 bp, Homo sapiens
cccaccagctgcaac

SEQ ID NO: 2141218 - DNA, 15 bp, Homo sapiens
ccaccagctgcaact

SEQ ID NO: 2141219 - DNA, 15 bp, Homo sapiens
caccagctgcaactc

SEQ ID NO: 2141220 - DNA, 15 bp, Homo sapiens
accagctgcaactca

SEQ ID NO: 2141221 - DNA, 15 bp, Homo sapiens
ccagctgcaactcag

SEQ ID NO: 2141222 - DNA, 15 bp, Homo sapiens
cagctgcaactcaga

SEQ ID NO: 2141223 - DNA, 15 bp, Homo sapiens
agctgcaactcagat

SEQ ID NO: 2141224 - DNA, 15 bp, Homo sapiens
gctgcaactcagatg

SEQ ID NO: 2141225 - DNA, 15 bp, Homo sapiens
ctgcaactcagatgt

SEQ ID NO: 2141226 - DNA, 15 bp, Homo sapiens
tgcaactcagatgta

SEQ ID NO: 2141227 - DNA, 15 bp, Homo sapiens
gcaactcagatgtaa

SEQ ID NO: 2141228 - DNA, 15 bp, Homo sapiens
caactcagatgtaat

SEQ ID NO: 2141229 - DNA, 15 bp, Homo sapiens
aactcagatgtaatg

SEQ ID NO: 2141230 - DNA, 15 bp, Homo sapiens
actcagatgtaatgg

SEQ ID NO: 2141231 - DNA, 15 bp, Homo sapiens
ctcagatgtaatggc

SEQ ID NO: 2141232 - DNA, 15 bp, Homo sapiens
tcagatgtaatggct

SEQ ID NO: 2141233 - DNA, 15 bp, Homo sapiens
cagatgtaatggcta

SEQ ID NO: 2141234 - DNA, 15 bp, Homo sapiens
agatgtaatggctac

SEQ ID NO: 2141235 - DNA, 15 bp, Homo sapiens
gatgtaatggctacc

SEQ ID NO: 2141236 - DNA, 15 bp, Homo sapiens
atgtaatggctaccc

SEQ ID NO: 2141237 - DNA, 15 bp, Homo sapiens
tgtaatggctaccca

SEQ ID NO: 2141238 - DNA, 15 bp, Homo sapiens
gtaatggctacccag

SEQ ID NO: 2141239 - DNA, 15 bp, Homo sapiens
taatggctacccagt

SEQ ID NO: 2141240 - DNA, 15 bp, Homo sapiens
aatggctacccagtt

SEQ ID NO: 2141241 - DNA, 15 bp, Homo sapiens
atggctacccagttt

SEQ ID NO: 2141242 - DNA, 15 bp, Homo sapiens
tggctacccagtttc

SEQ ID NO: 2141243 - DNA, 15 bp, Homo sapiens
ggctacccagtttca

SEQ ID NO: 2141244 - DNA, 15 bp, Homo sapiens
gctacccagtttcag

SEQ ID NO: 2141245 - DNA, 15 bp, Homo sapiens
ctacccagtttcagt

SEQ ID NO: 2141246 - DNA, 15 bp, Homo sapiens
tacccagtttcagta

SEQ ID NO: 2141247 - DNA, 15 bp, Homo sapiens
acccagtttcagtat

SEQ ID NO: 2141248 - DNA, 15 bp, Homo sapiens
cccagtttcagtata

SEQ ID NO: 2141249 - DNA, 15 bp, Homo sapiens
ccagtttcagtatac

SEQ ID NO: 2141250 - DNA, 15 bp, Homo sapiens
cagtttcagtataca

SEQ ID NO: 2141251 - DNA, 15 bp, Homo sapiens
agtttcagtatacag

SEQ ID NO: 2141252 - DNA, 15 bp, Homo sapiens
gtttcagtatacaga

SEQ ID NO: 2141253 - DNA, 15 bp, Homo sapiens
tttcagtatacagat

SEQ ID NO: 2141254 - DNA, 15 bp, Homo sapiens
ttcagtatacagatg

SEQ ID NO: 2141255 - DNA, 15 bp, Homo sapiens
tcagtatacagatgg

SEQ ID NO: 2141256 - DNA, 15 bp, Homo sapiens
cagtatacagatggg

SEQ ID NO: 2141257 - DNA, 15 bp, Homo sapiens
agtatacagatggga

SEQ ID NO: 2141258 - DNA, 15 bp, Homo sapiens
gtatacagatgggag

SEQ ID NO: 2141259 - DNA, 15 bp, Homo sapiens
tatacagatgggagt

SEQ ID NO: 2141260 - DNA, 15 bp, Homo sapiens
atacagatgggagtg

SEQ ID NO: 2141261 - DNA, 15 bp, Homo sapiens
tacagatgggagtga

SEQ ID NO: 2141262 - DNA, 15 bp, Homo sapiens
acagatgggagtgat

SEQ ID NO: 2141263 - DNA, 15 bp, Homo sapiens
cagatgggagtgatt

SEQ ID NO: 2141264 - DNA, 15 bp, Homo sapiens
agatgggagtgattc

SEQ ID NO: 2141265 - DNA, 15 bp, Homo sapiens
gatgggagtgattcc

SEQ ID NO: 2141266 - DNA, 15 bp, Homo sapiens
atgggagtgattccc

SEQ ID NO: 2141267 - DNA, 15 bp, Homo sapiens
tgggagtgattccct

SEQ ID NO: 2141268 - DNA, 15 bp, Homo sapiens
gggagtgattcccta

SEQ ID NO: 2141269 - DNA, 15 bp, Homo sapiens
ggagtgattccctat

SEQ ID NO: 2141270 - DNA, 15 bp, Homo sapiens
gagtgattccctatg

SEQ ID NO: 2141271 - DNA, 15 bp, Homo sapiens
agtgattccctatga

SEQ ID NO: 2141272 - DNA, 15 bp, Homo sapiens
gtgattccctatgag

SEQ ID NO: 2141273 - DNA, 15 bp, Homo sapiens
tgattccctatgaga

SEQ ID NO: 2141274 - DNA, 15 bp, Homo sapiens
gattccctatgagat

SEQ ID NO: 2141275 - DNA, 15 bp, Homo sapiens
attccctatgagatg

SEQ ID NO: 2141276 - DNA, 15 bp, Homo sapiens
ttccctatgagatga

SEQ ID NO: 2141277 - DNA, 15 bp, Homo sapiens
tccctatgagatgaa

SEQ ID NO: 2141278 - DNA, 15 bp, Homo sapiens
ccctatgagatgaaa

SEQ ID NO: 2141279 - DNA, 15 bp, Homo sapiens
cctatgagatgaaag

SEQ ID NO: 2141280 - DNA, 15 bp, Homo sapiens
ctatgagatgaaagt

SEQ ID NO: 2141281 - DNA, 15 bp, Homo sapiens
tatgagatgaaagta

SEQ ID NO: 2141282 - DNA, 15 bp, Homo sapiens
atgagatgaaagtac

SEQ ID NO: 2141283 - DNA, 15 bp, Homo sapiens
tgagatgaaagtaca

SEQ ID NO: 2141284 - DNA, 15 bp, Homo sapiens
gagatgaaagtacaa

SEQ ID NO: 2141285 - DNA, 15 bp, Homo sapiens
agatgaaagtacaat

SEQ ID NO: 2141286 - DNA, 15 bp, Homo sapiens
gatgaaagtacaatg

SEQ ID NO: 2141287 - DNA, 15 bp, Homo sapiens
atgaaagtacaatga

SEQ ID NO: 2141288 - DNA, 15 bp, Homo sapiens
tgaaagtacaatgac

SEQ ID NO: 2141289 - DNA, 15 bp, Homo sapiens
gaaagtacaatgact

SEQ ID NO: 2141290 - DNA, 15 bp, Homo sapiens
aaagtacaatgactt

SEQ ID NO: 2141291 - DNA, 15 bp, Homo sapiens
aagtacaatgacttg

SEQ ID NO: 2141292 - DNA, 15 bp, Homo sapiens
agtacaatgacttgg

SEQ ID NO: 2141293 - DNA, 15 bp, Homo sapiens
gtacaatgacttgga

SEQ ID NO: 2141294 - DNA, 15 bp, Homo sapiens
tacaatgacttggaa

SEQ ID NO: 2141295 - DNA, 15 bp, Homo sapiens
acaatgacttggaag

SEQ ID NO: 2141296 - DNA, 15 bp, Homo sapiens
caatgacttggaagg

SEQ ID NO: 2141297 - DNA, 15 bp, Homo sapiens
aatgacttggaagga

SEQ ID NO: 2141298 - DNA, 15 bp, Homo sapiens
atgacttggaaggaa

SEQ ID NO: 2141299 - DNA, 15 bp, Homo sapiens
tgacttggaaggaaa

SEQ ID NO: 2141300 - DNA, 15 bp, Homo sapiens
gacttggaaggaaat

SEQ ID NO: 2141301 - DNA, 15 bp, Homo sapiens
acttggaaggaaatc

SEQ ID NO: 2141302 - DNA, 15 bp, Homo sapiens
cttggaaggaaatca

SEQ ID NO: 2141303 - DNA, 15 bp, Homo sapiens
ttggaaggaaatcaa

SEQ ID NO: 2141304 - DNA, 15 bp, Homo sapiens
tggaaggaaatcaag

SEQ ID NO: 2141305 - DNA, 15 bp, Homo sapiens
ggaaggaaatcaagt

SEQ ID NO: 2141306 - DNA, 15 bp, Homo sapiens
gaaggaaatcaagtc

SEQ ID NO: 2141307 - DNA, 15 bp, Homo sapiens
aaggaaatcaagtcc

SEQ ID NO: 2141308 - DNA, 15 bp, Homo sapiens
aggaaatcaagtccc

SEQ ID NO: 2141309 - DNA, 15 bp, Homo sapiens
ggaaatcaagtccct

SEQ ID NO: 2141310 - DNA, 15 bp, Homo sapiens
gaaatcaagtccctg

SEQ ID NO: 2141311 - DNA, 15 bp, Homo sapiens
aaatcaagtccctga

SEQ ID NO: 2141312 - DNA, 15 bp, Homo sapiens
aatcaagtccctgaa

SEQ ID NO: 2141313 - DNA, 15 bp, Homo sapiens
atcaagtccctgaat

SEQ ID NO: 2141314 - DNA, 15 bp, Homo sapiens
tcaagtccctgaatg

SEQ ID NO: 2141315 - DNA, 15 bp, Homo sapiens
caagtccctgaatga

SEQ ID NO: 2141316 - DNA, 15 bp, Homo sapiens
aagtccctgaatgac

SEQ ID NO: 2141317 - DNA, 15 bp, Homo sapiens
agtccctgaatgact

SEQ ID NO: 2141318 - DNA, 15 bp, Homo sapiens
gtccctgaatgacta

SEQ ID NO: 2141319 - DNA, 15 bp, Homo sapiens
tccctgaatgactaa

SEQ ID NO: 2141320 - DNA, 15 bp, Homo sapiens
ccctgaatgactaag

SEQ ID NO: 2141321 - DNA, 15 bp, Homo sapiens
cctgaatgactaaga

SEQ ID NO: 2141322 - DNA, 15 bp, Homo sapiens
ctgaatgactaagaa

SEQ ID NO: 2141323 - DNA, 15 bp, Homo sapiens
tgaatgactaagaaa

SEQ ID NO: 2141324 - DNA, 15 bp, Homo sapiens
gaatgactaagaaac

SEQ ID NO: 2141325 - DNA, 15 bp, Homo sapiens
aatgactaagaaaca

SEQ ID NO: 2141326 - DNA, 15 bp, Homo sapiens
atgactaagaaacag

SEQ ID NO: 2141327 - DNA, 15 bp, Homo sapiens
tgactaagaaacaga

SEQ ID NO: 2141328 - DNA, 15 bp, Homo sapiens
gactaagaaacagaa

SEQ ID NO: 2141329 - DNA, 15 bp, Homo sapiens
actaagaaacagaat

SEQ ID NO: 2141330 - DNA, 15 bp, Homo sapiens
ctaagaaacagaatt

SEQ ID NO: 2141331 - DNA, 15 bp, Homo sapiens
taagaaacagaattc

SEQ ID NO: 2141332 - DNA, 15 bp, Homo sapiens
aagaaacagaattcc

SEQ ID NO: 2141333 - DNA, 15 bp, Homo sapiens
agaaacagaattccc

SEQ ID NO: 2141334 - DNA, 15 bp, Homo sapiens
gaaacagaattccct

SEQ ID NO: 2141335 - DNA, 15 bp, Homo sapiens
aaacagaattccctc

SEQ ID NO: 2141336 - DNA, 15 bp, Homo sapiens
aacagaattccctct

SEQ ID NO: 2141337 - DNA, 15 bp, Homo sapiens
acagaattccctctc

SEQ ID NO: 2141338 - DNA, 15 bp, Homo sapiens
cagaattccctctct

SEQ ID NO: 2141339 - DNA, 15 bp, Homo sapiens
agaattccctctctg

SEQ ID NO: 2141340 - DNA, 15 bp, Homo sapiens
gaattccctctctga

SEQ ID NO: 2141341 - DNA, 15 bp, Homo sapiens
aattccctctctgat

SEQ ID NO: 2141342 - DNA, 15 bp, Homo sapiens
attccctctctgatt

SEQ ID NO: 2141343 - DNA, 15 bp, Homo sapiens
ttccctctctgattt

SEQ ID NO: 2141344 - DNA, 15 bp, Homo sapiens
tccctctctgatttg

SEQ ID NO: 2141345 - DNA, 15 bp, Homo sapiens
ccctctctgatttga

SEQ ID NO: 2141346 - DNA, 15 bp, Homo sapiens
cctctctgatttgaa

SEQ ID NO: 2141347 - DNA, 15 bp, Homo sapiens
ctctctgatttgaac

SEQ ID NO: 2141348 - DNA, 15 bp, Homo sapiens
tctctgatttgaact

SEQ ID NO: 2141349 - DNA, 15 bp, Homo sapiens
ctctgatttgaactt

SEQ ID NO: 2141350 - DNA, 15 bp, Homo sapiens
tctgatttgaacttt

SEQ ID NO: 2141351 - DNA, 15 bp, Homo sapiens
ctgatttgaactttt

SEQ ID NO: 2141352 - DNA, 15 bp, Homo sapiens
tgatttgaacttttt

SEQ ID NO: 2141353 - DNA, 15 bp, Homo sapiens
gatttgaacttttta

SEQ ID NO: 2141354 - DNA, 15 bp, Homo sapiens
atttgaactttttac

SEQ ID NO: 2141355 - DNA, 15 bp, Homo sapiens
tttgaactttttaca

SEQ ID NO: 2141356 - DNA, 15 bp, Homo sapiens
ttgaactttttacat

SEQ ID NO: 2141357 - DNA, 15 bp, Homo sapiens
tgaactttttacatt

SEQ ID NO: 2141358 - DNA, 15 bp, Homo sapiens
gaactttttacattg

SEQ ID NO: 2141359 - DNA, 15 bp, Homo sapiens
aactttttacattga

SEQ ID NO: 2141360 - DNA, 15 bp, Homo sapiens
actttttacattgat

SEQ ID NO: 2141361 - DNA, 15 bp, Homo sapiens
ctttttacattgata

SEQ ID NO: 2141362 - DNA, 15 bp, Homo sapiens
tttttacattgatac

SEQ ID NO: 2141363 - DNA, 15 bp, Homo sapiens
ttttacattgatact

SEQ ID NO: 2141364 - DNA, 15 bp, Homo sapiens
tttacattgatactg

SEQ ID NO: 2141365 - DNA, 15 bp, Homo sapiens
ttacattgatactgt

SEQ ID NO: 2141366 - DNA, 15 bp, Homo sapiens
tacattgatactgtc

SEQ ID NO: 2141367 - DNA, 15 bp, Homo sapiens
acattgatactgtca

SEQ ID NO: 2141368 - DNA, 15 bp, Homo sapiens
cattgatactgtcat

SEQ ID NO: 2141369 - DNA, 15 bp, Homo sapiens
attgatactgtcatg

SEQ ID NO: 2141370 - DNA, 15 bp, Homo sapiens
ttgatactgtcatgt

SEQ ID NO: 2141371 - DNA, 15 bp, Homo sapiens
tgatactgtcatgta

SEQ ID NO: 2141372 - DNA, 15 bp, Homo sapiens
gatactgtcatgtaa

SEQ ID NO: 2141373 - DNA, 15 bp, Homo sapiens
atactgtcatgtaag

SEQ ID NO: 2141374 - DNA, 15 bp, Homo sapiens
tactgtcatgtaaga

SEQ ID NO: 2141375 - DNA, 15 bp, Homo sapiens
actgtcatgtaagaa

SEQ ID NO: 2141376 - DNA, 15 bp, Homo sapiens
ctgtcatgtaagaaa

SEQ ID NO: 2141377 - DNA, 15 bp, Homo sapiens
tgtcatgtaagaaat

SEQ ID NO: 2141378 - DNA, 15 bp, Homo sapiens
gtcatgtaagaaata

SEQ ID NO: 2141379 - DNA, 15 bp, Homo sapiens
tcatgtaagaaataa

SEQ ID NO: 2141380 - DNA, 15 bp, Homo sapiens
catgtaagaaataat

SEQ ID NO: 2141381 - DNA, 15 bp, Homo sapiens
atgtaagaaataatt

SEQ ID NO: 2141382 - DNA, 15 bp, Homo sapiens
tgtaagaaataatta

SEQ ID NO: 2141383 - DNA, 15 bp, Homo sapiens
gtaagaaataattaa

SEQ ID NO: 2141384 - DNA, 15 bp, Homo sapiens
taagaaataattaac

SEQ ID NO: 2141385 - DNA, 15 bp, Homo sapiens
aagaaataattaaca

SEQ ID NO: 2141386 - DNA, 15 bp, Homo sapiens
agaaataattaacac

SEQ ID NO: 2141387 - DNA, 15 bp, Homo sapiens
gaaataattaacact

SEQ ID NO: 2141388 - DNA, 15 bp, Homo sapiens
aaataattaacactc

SEQ ID NO: 2141389 - DNA, 15 bp, Homo sapiens
aataattaacactct

SEQ ID NO: 2141390 - DNA, 15 bp, Homo sapiens
ataattaacactctt

SEQ ID NO: 2141391 - DNA, 15 bp, Homo sapiens
taattaacactcttt

SEQ ID NO: 2141392 - DNA, 15 bp, Homo sapiens
aattaacactctttt

SEQ ID NO: 2141393 - DNA, 15 bp, Homo sapiens
attaacactcttttt

SEQ ID NO: 2141394 - DNA, 15 bp, Homo sapiens
ttaacactctttttg

SEQ ID NO: 2141395 - DNA, 15 bp, Homo sapiens
taacactctttttgt

SEQ ID NO: 2141396 - DNA, 15 bp, Homo sapiens
aacactctttttgtt

SEQ ID NO: 2141397 - DNA, 15 bp, Homo sapiens
acactctttttgttt

SEQ ID NO: 2141398 - DNA, 15 bp, Homo sapiens
cactctttttgttta

SEQ ID NO: 2141399 - DNA, 15 bp, Homo sapiens
actctttttgtttaa

SEQ ID NO: 2141400 - DNA, 15 bp, Homo sapiens
ctctttttgtttaat

SEQ ID NO: 2141401 - DNA, 15 bp, Homo sapiens
tctttttgtttaatc

SEQ ID NO: 2141402 - DNA, 15 bp, Homo sapiens
ctttttgtttaatcc

SEQ ID NO: 2141403 - DNA, 15 bp, Homo sapiens
tttttgtttaatcca

SEQ ID NO: 2141404 - DNA, 15 bp, Homo sapiens
ttttgtttaatccat

SEQ ID NO: 2141405 - DNA, 15 bp, Homo sapiens
tttgtttaatccatt

SEQ ID NO: 2141406 - DNA, 15 bp, Homo sapiens
ttgtttaatccattg

SEQ ID NO: 2141407 - DNA, 15 bp, Homo sapiens
tgtttaatccattga

SEQ ID NO: 2141408 - DNA, 15 bp, Homo sapiens
gtttaatccattgaa

SEQ ID NO: 2141409 - DNA, 15 bp, Homo sapiens
tttaatccattgaat

SEQ ID NO: 2141410 - DNA, 15 bp, Homo sapiens
ttaatccattgaatt

SEQ ID NO: 2141411 - DNA, 15 bp, Homo sapiens
taatccattgaattg

SEQ ID NO: 2141412 - DNA, 15 bp, Homo sapiens
aatccattgaattgt

SEQ ID NO: 2141413 - DNA, 15 bp, Homo sapiens
atccattgaattgtt

SEQ ID NO: 2141414 - DNA, 15 bp, Homo sapiens
tccattgaattgttg

SEQ ID NO: 2141415 - DNA, 15 bp, Homo sapiens
ccattgaattgttga

SEQ ID NO: 2141416 - DNA, 15 bp, Homo sapiens
cattgaattgttgat

SEQ ID NO: 2141417 - DNA, 15 bp, Homo sapiens
attgaattgttgatt

SEQ ID NO: 2141418 - DNA, 15 bp, Homo sapiens
ttgaattgttgattc

SEQ ID NO: 2141419 - DNA, 15 bp, Homo sapiens
tgaattgttgattct

SEQ ID NO: 2141420 - DNA, 15 bp, Homo sapiens
gaattgttgattctc

SEQ ID NO: 2141421 - DNA, 15 bp, Homo sapiens
aattgttgattctct

SEQ ID NO: 2141422 - DNA, 15 bp, Homo sapiens
attgttgattctctt

SEQ ID NO: 2141423 - DNA, 15 bp, Homo sapiens
ttgttgattctcttt

SEQ ID NO: 2141424 - DNA, 15 bp, Homo sapiens
tgttgattctctttc

SEQ ID NO: 2141425 - DNA, 15 bp, Homo sapiens
gttgattctctttcc

SEQ ID NO: 2141426 - DNA, 15 bp, Homo sapiens
ttgattctctttcct

SEQ ID NO: 2141427 - DNA, 15 bp, Homo sapiens
tgattctctttccta

SEQ ID NO: 2141428 - DNA, 15 bp, Homo sapiens
gattctctttcctat

SEQ ID NO: 2141429 - DNA, 15 bp, Homo sapiens
attctctttcctata

SEQ ID NO: 2141430 - DNA, 15 bp, Homo sapiens
ttctctttcctatag

SEQ ID NO: 2141431 - DNA, 15 bp, Homo sapiens
tctctttcctatagt

SEQ ID NO: 2141432 - DNA, 15 bp, Homo sapiens
ctctttcctatagta

SEQ ID NO: 2141433 - DNA, 15 bp, Homo sapiens
tctttcctatagtag

SEQ ID NO: 2141434 - DNA, 15 bp, Homo sapiens
ctttcctatagtagc

SEQ ID NO: 2141435 - DNA, 15 bp, Homo sapiens
tttcctatagtagcc

SEQ ID NO: 2141436 - DNA, 15 bp, Homo sapiens
ttcctatagtagcca

SEQ ID NO: 2141437 - DNA, 15 bp, Homo sapiens
tcctatagtagccaa

SEQ ID NO: 2141438 - DNA, 15 bp, Homo sapiens
cctatagtagccaat

SEQ ID NO: 2141439 - DNA, 15 bp, Homo sapiens
ctatagtagccaatt

SEQ ID NO: 2141440 - DNA, 15 bp, Homo sapiens
tatagtagccaattt

SEQ ID NO: 2141441 - DNA, 15 bp, Homo sapiens
atagtagccaatttt

SEQ ID NO: 2141442 - DNA, 15 bp, Homo sapiens
tagtagccaattttt

SEQ ID NO: 2141443 - DNA, 15 bp, Homo sapiens
agtagccaatttttc

SEQ ID NO: 2141444 - DNA, 15 bp, Homo sapiens
gtagccaatttttct

SEQ ID NO: 2141445 - DNA, 15 bp, Homo sapiens
tagccaatttttctt

SEQ ID NO: 2141446 - DNA, 15 bp, Homo sapiens
agccaatttttcttc

SEQ ID NO: 2141447 - DNA, 15 bp, Homo sapiens
gccaatttttcttct

SEQ ID NO: 2141448 - DNA, 15 bp, Homo sapiens
ccaatttttcttctc

SEQ ID NO: 2141449 - DNA, 15 bp, Homo sapiens
caatttttcttctca

SEQ ID NO: 2141450 - DNA, 15 bp, Homo sapiens
aatttttcttctcat

SEQ ID NO: 2141451 - DNA, 15 bp, Homo sapiens
atttttcttctcata

SEQ ID NO: 2141452 - DNA, 15 bp, Homo sapiens
tttttcttctcataa

SEQ ID NO: 2141453 - DNA, 15 bp, Homo sapiens
ttttcttctcataac

SEQ ID NO: 2141454 - DNA, 15 bp, Homo sapiens
tttcttctcataact

SEQ ID NO: 2141455 - DNA, 15 bp, Homo sapiens
ttcttctcataacta

SEQ ID NO: 2141456 - DNA, 15 bp, Homo sapiens
tcttctcataactaa

SEQ ID NO: 2141457 - DNA, 15 bp, Homo sapiens
cttctcataactaat

SEQ ID NO: 2141458 - DNA, 15 bp, Homo sapiens
ttctcataactaatt

SEQ ID NO: 2141459 - DNA, 15 bp, Homo sapiens
tctcataactaattc

SEQ ID NO: 2141460 - DNA, 15 bp, Homo sapiens
ctcataactaattca

SEQ ID NO: 2141461 - DNA, 15 bp, Homo sapiens
tcataactaattcaa

SEQ ID NO: 2141462 - DNA, 15 bp, Homo sapiens
cataactaattcaac

SEQ ID NO: 2141463 - DNA, 15 bp, Homo sapiens
ataactaattcaact

SEQ ID NO: 2141464 - DNA, 15 bp, Homo sapiens
taactaattcaactg

SEQ ID NO: 2141465 - DNA, 15 bp, Homo sapiens
aactaattcaactgg

SEQ ID NO: 2141466 - DNA, 15 bp, Homo sapiens
actaattcaactgga

SEQ ID NO: 2141467 - DNA, 15 bp, Homo sapiens
ctaattcaactggat

SEQ ID NO: 2141468 - DNA, 15 bp, Homo sapiens
taattcaactggatg

SEQ ID NO: 2141469 - DNA, 15 bp, Homo sapiens
aattcaactggatgc

SEQ ID NO: 2141470 - DNA, 15 bp, Homo sapiens
attcaactggatgca

SEQ ID NO: 2141471 - DNA, 15 bp, Homo sapiens
ttcaactggatgcat

SEQ ID NO: 2141472 - DNA, 15 bp, Homo sapiens
tcaactggatgcatc

SEQ ID NO: 2141473 - DNA, 15 bp, Homo sapiens
caactggatgcatcc

SEQ ID NO: 2141474 - DNA, 15 bp, Homo sapiens
aactggatgcatccc

SEQ ID NO: 2141475 - DNA, 15 bp, Homo sapiens
actggatgcatcccc

SEQ ID NO: 2141476 - DNA, 15 bp, Homo sapiens
ctggatgcatcccca

SEQ ID NO: 2141477 - DNA, 15 bp, Homo sapiens
tggatgcatccccag

SEQ ID NO: 2141478 - DNA, 15 bp, Homo sapiens
ggatgcatccccaga

SEQ ID NO: 2141479 - DNA, 15 bp, Homo sapiens
gatgcatccccagaa

SEQ ID NO: 2141480 - DNA, 15 bp, Homo sapiens
atgcatccccagaat

SEQ ID NO: 2141481 - DNA, 15 bp, Homo sapiens
tgcatccccagaatc

SEQ ID NO: 2141482 - DNA, 15 bp, Homo sapiens
gcatccccagaatcc

SEQ ID NO: 2141483 - DNA, 15 bp, Homo sapiens
catccccagaatcct

SEQ ID NO: 2141484 - DNA, 15 bp, Homo sapiens
atccccagaatcctt

SEQ ID NO: 2141485 - DNA, 15 bp, Homo sapiens
tccccagaatccttc

SEQ ID NO: 2141486 - DNA, 15 bp, Homo sapiens
ccccagaatccttca

SEQ ID NO: 2141487 - DNA, 15 bp, Homo sapiens
cccagaatccttcac

SEQ ID NO: 2141488 - DNA, 15 bp, Homo sapiens
ccagaatccttcacg

SEQ ID NO: 2141489 - DNA, 15 bp, Homo sapiens
cagaatccttcacgt

SEQ ID NO: 2141490 - DNA, 15 bp, Homo sapiens
agaatccttcacgta

SEQ ID NO: 2141491 - DNA, 15 bp, Homo sapiens
gaatccttcacgtag

SEQ ID NO: 2141492 - DNA, 15 bp, Homo sapiens
aatccttcacgtagc

SEQ ID NO: 2141493 - DNA, 15 bp, Homo sapiens
atccttcacgtagca

SEQ ID NO: 2141494 - DNA, 15 bp, Homo sapiens
tccttcacgtagcat

SEQ ID NO: 2141495 - DNA, 15 bp, Homo sapiens
ccttcacgtagcatt

SEQ ID NO: 2141496 - DNA, 15 bp, Homo sapiens
cttcacgtagcattt

SEQ ID NO: 2141497 - DNA, 15 bp, Homo sapiens
ttcacgtagcatttc

SEQ ID NO: 2141498 - DNA, 15 bp, Homo sapiens
tcacgtagcatttca

SEQ ID NO: 2141499 - DNA, 15 bp, Homo sapiens
cacgtagcatttcag

SEQ ID NO: 2141500 - DNA, 15 bp, Homo sapiens
acgtagcatttcagg

SEQ ID NO: 2141501 - DNA, 15 bp, Homo sapiens
cgtagcatttcaggt

SEQ ID NO: 2141502 - DNA, 15 bp, Homo sapiens
gtagcatttcaggtg

SEQ ID NO: 2141503 - DNA, 15 bp, Homo sapiens
tagcatttcaggtgg

SEQ ID NO: 2141504 - DNA, 15 bp, Homo sapiens
agcatttcaggtggc

SEQ ID NO: 2141505 - DNA, 15 bp, Homo sapiens
gcatttcaggtggct

SEQ ID NO: 2141506 - DNA, 15 bp, Homo sapiens
catttcaggtggctg

SEQ ID NO: 2141507 - DNA, 15 bp, Homo sapiens
atttcaggtggctgc

SEQ ID NO: 2141508 - DNA, 15 bp, Homo sapiens
tttcaggtggctgct

SEQ ID NO: 2141509 - DNA, 15 bp, Homo sapiens
ttcaggtggctgcta

SEQ ID NO: 2141510 - DNA, 15 bp, Homo sapiens
tcaggtggctgctac

SEQ ID NO: 2141511 - DNA, 15 bp, Homo sapiens
caggtggctgctact

SEQ ID NO: 2141512 - DNA, 15 bp, Homo sapiens
aggtggctgctacta

SEQ ID NO: 2141513 - DNA, 15 bp, Homo sapiens
ggtggctgctactaa

SEQ ID NO: 2141514 - DNA, 15 bp, Homo sapiens
gtggctgctactaat

SEQ ID NO: 2141515 - DNA, 15 bp, Homo sapiens
tggctgctactaata

SEQ ID NO: 2141516 - DNA, 15 bp, Homo sapiens
ggctgctactaataa

SEQ ID NO: 2141517 - DNA, 15 bp, Homo sapiens
gctgctactaataat

SEQ ID NO: 2141518 - DNA, 15 bp, Homo sapiens
ctgctactaataatt

SEQ ID NO: 2141519 - DNA, 15 bp, Homo sapiens
tgctactaataattt

SEQ ID NO: 2141520 - DNA, 15 bp, Homo sapiens
gctactaataattta

SEQ ID NO: 2141521 - DNA, 15 bp, Homo sapiens
ctactaataatttag

SEQ ID NO: 2141522 - DNA, 15 bp, Homo sapiens
tactaataatttaga

SEQ ID NO: 2141523 - DNA, 15 bp, Homo sapiens
actaataatttagag

SEQ ID NO: 2141524 - DNA, 15 bp, Homo sapiens
ctaataatttagagt

SEQ ID NO: 2141525 - DNA, 15 bp, Homo sapiens
taataatttagagtt

SEQ ID NO: 2141526 - DNA, 15 bp, Homo sapiens
aataatttagagttg

SEQ ID NO: 2141527 - DNA, 15 bp, Homo sapiens
ataatttagagttgg

SEQ ID NO: 2141528 - DNA, 15 bp, Homo sapiens
taatttagagttggc

SEQ ID NO: 2141529 - DNA, 15 bp, Homo sapiens
aatttagagttggca

SEQ ID NO: 2141530 - DNA, 15 bp, Homo sapiens
atttagagttggcat

SEQ ID NO: 2141531 - DNA, 15 bp, Homo sapiens
tttagagttggcatg

SEQ ID NO: 2141532 - DNA, 15 bp, Homo sapiens
ttagagttggcatgc

SEQ ID NO: 2141533 - DNA, 15 bp, Homo sapiens
tagagttggcatgca

SEQ ID NO: 2141534 - DNA, 15 bp, Homo sapiens
agagttggcatgcaa

SEQ ID NO: 2141535 - DNA, 15 bp, Homo sapiens
gagttggcatgcaag

SEQ ID NO: 2141536 - DNA, 15 bp, Homo sapiens
agttggcatgcaaga

SEQ ID NO: 2141537 - DNA, 15 bp, Homo sapiens
gttggcatgcaagat

SEQ ID NO: 2141538 - DNA, 15 bp, Homo sapiens
ttggcatgcaagata

SEQ ID NO: 2141539 - DNA, 15 bp, Homo sapiens
tggcatgcaagataa

SEQ ID NO: 2141540 - DNA, 15 bp, Homo sapiens
ggcatgcaagataaa

SEQ ID NO: 2141541 - DNA, 15 bp, Homo sapiens
gcatgcaagataaaa

SEQ ID NO: 2141542 - DNA, 15 bp, Homo sapiens
catgcaagataaaat

SEQ ID NO: 2141543 - DNA, 15 bp, Homo sapiens
atgcaagataaaatt

SEQ ID NO: 2141544 - DNA, 15 bp, Homo sapiens
tgcaagataaaattt

SEQ ID NO: 2141545 - DNA, 15 bp, Homo sapiens
gcaagataaaattta

SEQ ID NO: 2141546 - DNA, 15 bp, Homo sapiens
caagataaaatttat

SEQ ID NO: 2141547 - DNA, 15 bp, Homo sapiens
aagataaaatttatt

SEQ ID NO: 2141548 - DNA, 15 bp, Homo sapiens
agataaaatttattt

SEQ ID NO: 2141549 - DNA, 15 bp, Homo sapiens
gataaaatttattta

SEQ ID NO: 2141550 - DNA, 15 bp, Homo sapiens
ataaaatttatttac

SEQ ID NO: 2141551 - DNA, 15 bp, Homo sapiens
taaaatttatttacc

SEQ ID NO: 2141552 - DNA, 15 bp, Homo sapiens
aaaatttatttacca

SEQ ID NO: 2141553 - DNA, 15 bp, Homo sapiens
aaatttatttaccat

SEQ ID NO: 2141554 - DNA, 15 bp, Homo sapiens
aatttatttaccatc

SEQ ID NO: 2141555 - DNA, 15 bp, Homo sapiens
atttatttaccatcc

SEQ ID NO: 2141556 - DNA, 15 bp, Homo sapiens
tttatttaccatcct

SEQ ID NO: 2141557 - DNA, 15 bp, Homo sapiens
ttatttaccatccta

SEQ ID NO: 2141558 - DNA, 15 bp, Homo sapiens
tatttaccatcctag

SEQ ID NO: 2141559 - DNA, 15 bp, Homo sapiens
atttaccatcctagc

SEQ ID NO: 2141560 - DNA, 15 bp, Homo sapiens
tttaccatcctagca

SEQ ID NO: 2141561 - DNA, 15 bp, Homo sapiens
ttaccatcctagcac

SEQ ID NO: 2141562 - DNA, 15 bp, Homo sapiens
taccatcctagcact

SEQ ID NO: 2141563 - DNA, 15 bp, Homo sapiens
accatcctagcacta

SEQ ID NO: 2141564 - DNA, 15 bp, Homo sapiens
ccatcctagcactaa

SEQ ID NO: 2141565 - DNA, 15 bp, Homo sapiens
catcctagcactaaa

SEQ ID NO: 2141566 - DNA, 15 bp, Homo sapiens
atcctagcactaaag

SEQ ID NO: 2141567 - DNA, 15 bp, Homo sapiens
tcctagcactaaagg

SEQ ID NO: 2141568 - DNA, 15 bp, Homo sapiens
cctagcactaaaggg

SEQ ID NO: 2141569 - DNA, 15 bp, Homo sapiens
ctagcactaaaggga

SEQ ID NO: 2141570 - DNA, 15 bp, Homo sapiens
tagcactaaagggat

SEQ ID NO: 2141571 - DNA, 15 bp, Homo sapiens
agcactaaagggata

SEQ ID NO: 2141572 - DNA, 15 bp, Homo sapiens
gcactaaagggataa

SEQ ID NO: 2141573 - DNA, 15 bp, Homo sapiens
cactaaagggataaa

SEQ ID NO: 2141574 - DNA, 15 bp, Homo sapiens
actaaagggataaat

SEQ ID NO: 2141575 - DNA, 15 bp, Homo sapiens
ctaaagggataaatc

SEQ ID NO: 2141576 - DNA, 15 bp, Homo sapiens
taaagggataaatcg

SEQ ID NO: 2141577 - DNA, 15 bp, Homo sapiens
aaagggataaatcgc

SEQ ID NO: 2141578 - DNA, 15 bp, Homo sapiens
aagggataaatcgct

SEQ ID NO: 2141579 - DNA, 15 bp, Homo sapiens
agggataaatcgctg

SEQ ID NO: 2141580 - DNA, 15 bp, Homo sapiens
gggataaatcgctga

SEQ ID NO: 2141581 - DNA, 15 bp, Homo sapiens
ggataaatcgctgac

SEQ ID NO: 2141582 - DNA, 15 bp, Homo sapiens
gataaatcgctgaca

SEQ ID NO: 2141583 - DNA, 15 bp, Homo sapiens
ataaatcgctgacag

SEQ ID NO: 2141584 - DNA, 15 bp, Homo sapiens
taaatcgctgacagc

SEQ ID NO: 2141585 - DNA, 15 bp, Homo sapiens
aaatcgctgacagca

SEQ ID NO: 2141586 - DNA, 15 bp, Homo sapiens
aatcgctgacagcag

SEQ ID NO: 2141587 - DNA, 15 bp, Homo sapiens
atcgctgacagcaga

SEQ ID NO: 2141588 - DNA, 15 bp, Homo sapiens
tcgctgacagcagat

SEQ ID NO: 2141589 - DNA, 15 bp, Homo sapiens
cgctgacagcagatc

SEQ ID NO: 2141590 - DNA, 15 bp, Homo sapiens
gctgacagcagatcc

SEQ ID NO: 2141591 - DNA, 15 bp, Homo sapiens
ctgacagcagatcct

SEQ ID NO: 2141592 - DNA, 15 bp, Homo sapiens
tgacagcagatccta

SEQ ID NO: 2141593 - DNA, 15 bp, Homo sapiens
gacagcagatcctat

SEQ ID NO: 2141594 - DNA, 15 bp, Homo sapiens
acagcagatcctatt

SEQ ID NO: 2141595 - DNA, 15 bp, Homo sapiens
cagcagatcctattt

SEQ ID NO: 2141596 - DNA, 15 bp, Homo sapiens
agcagatcctatttt

SEQ ID NO: 2141597 - DNA, 15 bp, Homo sapiens
gcagatcctattttg

SEQ ID NO: 2141598 - DNA, 15 bp, Homo sapiens
cagatcctattttga

SEQ ID NO: 2141599 - DNA, 15 bp, Homo sapiens
agatcctattttgaa

SEQ ID NO: 2141600 - DNA, 15 bp, Homo sapiens
gatcctattttgaaa

SEQ ID NO: 2141601 - DNA, 15 bp, Homo sapiens
atcctattttgaaag

SEQ ID NO: 2141602 - DNA, 15 bp, Homo sapiens
tcctattttgaaagc

SEQ ID NO: 2141603 - DNA, 15 bp, Homo sapiens
cctattttgaaagcc

SEQ ID NO: 2141604 - DNA, 15 bp, Homo sapiens
ctattttgaaagccg

SEQ ID NO: 2141605 - DNA, 15 bp, Homo sapiens
tattttgaaagccga

SEQ ID NO: 2141606 - DNA, 15 bp, Homo sapiens
attttgaaagccgat

SEQ ID NO: 2141607 - DNA, 15 bp, Homo sapiens
ttttgaaagccgatt

SEQ ID NO: 2141608 - DNA, 15 bp, Homo sapiens
tttgaaagccgatta

SEQ ID NO: 2141609 - DNA, 15 bp, Homo sapiens
ttgaaagccgattat

SEQ ID NO: 2141610 - DNA, 15 bp, Homo sapiens
tgaaagccgattatg

SEQ ID NO: 2141611 - DNA, 15 bp, Homo sapiens
gaaagccgattatga

SEQ ID NO: 2141612 - DNA, 15 bp, Homo sapiens
aaagccgattatgaa

SEQ ID NO: 2141613 - DNA, 15 bp, Homo sapiens
aagccgattatgaag

SEQ ID NO: 2141614 - DNA, 15 bp, Homo sapiens
agccgattatgaaga

SEQ ID NO: 2141615 - DNA, 15 bp, Homo sapiens
gccgattatgaagaa

SEQ ID NO: 2141616 - DNA, 15 bp, Homo sapiens
ccgattatgaagaag

SEQ ID NO: 2141617 - DNA, 15 bp, Homo sapiens
cgattatgaagaagc

SEQ ID NO: 2141618 - DNA, 15 bp, Homo sapiens
gattatgaagaagct

SEQ ID NO: 2141619 - DNA, 15 bp, Homo sapiens
attatgaagaagcta

SEQ ID NO: 2141620 - DNA, 15 bp, Homo sapiens
ttatgaagaagctag

SEQ ID NO: 2141621 - DNA, 15 bp, Homo sapiens
tatgaagaagctaga

SEQ ID NO: 2141622 - DNA, 15 bp, Homo sapiens
atgaagaagctagag

SEQ ID NO: 2141623 - DNA, 15 bp, Homo sapiens
tgaagaagctagaga

SEQ ID NO: 2141624 - DNA, 15 bp, Homo sapiens
gaagaagctagagaa

SEQ ID NO: 2141625 - DNA, 15 bp, Homo sapiens
aagaagctagagaac

SEQ ID NO: 2141626 - DNA, 15 bp, Homo sapiens
agaagctagagaaca

SEQ ID NO: 2141627 - DNA, 15 bp, Homo sapiens
gaagctagagaacag

SEQ ID NO: 2141628 - DNA, 15 bp, Homo sapiens
aagctagagaacagg

SEQ ID NO: 2141629 - DNA, 15 bp, Homo sapiens
agctagagaacagga

SEQ ID NO: 2141630 - DNA, 15 bp, Homo sapiens
gctagagaacaggag

SEQ ID NO: 2141631 - DNA, 15 bp, Homo sapiens
ctagagaacaggagt

SEQ ID NO: 2141632 - DNA, 15 bp, Homo sapiens
tagagaacaggagtc

SEQ ID NO: 2141633 - DNA, 15 bp, Homo sapiens
agagaacaggagtct

SEQ ID NO: 2141634 - DNA, 15 bp, Homo sapiens
gagaacaggagtctc

SEQ ID NO: 2141635 - DNA, 15 bp, Homo sapiens
agaacaggagtctct

SEQ ID NO: 2141636 - DNA, 15 bp, Homo sapiens
gaacaggagtctctg

SEQ ID NO: 2141637 - DNA, 15 bp, Homo sapiens
aacaggagtctctga

SEQ ID NO: 2141638 - DNA, 15 bp, Homo sapiens
acaggagtctctgag

SEQ ID NO: 2141639 - DNA, 15 bp, Homo sapiens
caggagtctctgaga

SEQ ID NO: 2141640 - DNA, 15 bp, Homo sapiens
aggagtctctgagaa

SEQ ID NO: 2141641 - DNA, 15 bp, Homo sapiens
ggagtctctgagaag

SEQ ID NO: 2141642 - DNA, 15 bp, Homo sapiens
gagtctctgagaaga

SEQ ID NO: 2141643 - DNA, 15 bp, Homo sapiens
agtctctgagaagaa

SEQ ID NO: 2141644 - DNA, 15 bp, Homo sapiens
gtctctgagaagaag

SEQ ID NO: 2141645 - DNA, 15 bp, Homo sapiens
tctctgagaagaagg

SEQ ID NO: 2141646 - DNA, 15 bp, Homo sapiens
ctctgagaagaagga

SEQ ID NO: 2141647 - DNA, 15 bp, Homo sapiens
tctgagaagaaggag

SEQ ID NO: 2141648 - DNA, 15 bp, Homo sapiens
ctgagaagaaggagt

SEQ ID NO: 2141649 - DNA, 15 bp, Homo sapiens
tgagaagaaggagta

SEQ ID NO: 2141650 - DNA, 15 bp, Homo sapiens
gagaagaaggagtac

SEQ ID NO: 2141651 - DNA, 15 bp, Homo sapiens
agaagaaggagtacc

SEQ ID NO: 2141652 - DNA, 15 bp, Homo sapiens
gaagaaggagtacca

SEQ ID NO: 2141653 - DNA, 15 bp, Homo sapiens
aagaaggagtaccat

SEQ ID NO: 2141654 - DNA, 15 bp, Homo sapiens
agaaggagtaccata

SEQ ID NO: 2141655 - DNA, 15 bp, Homo sapiens
gaaggagtaccatac

SEQ ID NO: 2141656 - DNA, 15 bp, Homo sapiens
aaggagtaccataca

SEQ ID NO: 2141657 - DNA, 15 bp, Homo sapiens
aggagtaccatacag

SEQ ID NO: 2141658 - DNA, 15 bp, Homo sapiens
ggagtaccatacaga

SEQ ID NO: 2141659 - DNA, 15 bp, Homo sapiens
gagtaccatacagaa

SEQ ID NO: 2141660 - DNA, 15 bp, Homo sapiens
agtaccatacagaag

SEQ ID NO: 2141661 - DNA, 15 bp, Homo sapiens
gtaccatacagaagg

SEQ ID NO: 2141662 - DNA, 15 bp, Homo sapiens
taccatacagaaggg

SEQ ID NO: 2141663 - DNA, 15 bp, Homo sapiens
accatacagaaggga

SEQ ID NO: 2141664 - DNA, 15 bp, Homo sapiens
ccatacagaagggaa

SEQ ID NO: 2141665 - DNA, 15 bp, Homo sapiens
catacagaagggaat

SEQ ID NO: 2141666 - DNA, 15 bp, Homo sapiens
atacagaagggaata

SEQ ID NO: 2141667 - DNA, 15 bp, Homo sapiens
tacagaagggaatag

SEQ ID NO: 2141668 - DNA, 15 bp, Homo sapiens
acagaagggaataga

SEQ ID NO: 2141669 - DNA, 15 bp, Homo sapiens
cagaagggaatagat

SEQ ID NO: 2141670 - DNA, 15 bp, Homo sapiens
agaagggaatagata

SEQ ID NO: 2141671 - DNA, 15 bp, Homo sapiens
gaagggaatagatat

SEQ ID NO: 2141672 - DNA, 15 bp, Homo sapiens
aagggaatagatatt

SEQ ID NO: 2141673 - DNA, 15 bp, Homo sapiens
agggaatagatatta

SEQ ID NO: 2141674 - DNA, 15 bp, Homo sapiens
gggaatagatattaa

SEQ ID NO: 2141675 - DNA, 15 bp, Homo sapiens
ggaatagatattaaa

SEQ ID NO: 2141676 - DNA, 15 bp, Homo sapiens
gaatagatattaaaa

SEQ ID NO: 2141677 - DNA, 15 bp, Homo sapiens
aatagatattaaaag

SEQ ID NO: 2141678 - DNA, 15 bp, Homo sapiens
atagatattaaaaga

SEQ ID NO: 2141679 - DNA, 15 bp, Homo sapiens
tagatattaaaagag

SEQ ID NO: 2141680 - DNA, 15 bp, Homo sapiens
agatattaaaagaga

SEQ ID NO: 2141681 - DNA, 15 bp, Homo sapiens
gatattaaaagagac

SEQ ID NO: 2141682 - DNA, 15 bp, Homo sapiens
atattaaaagagact

SEQ ID NO: 2141683 - DNA, 15 bp, Homo sapiens
tattaaaagagactg

SEQ ID NO: 2141684 - DNA, 15 bp, Homo sapiens
attaaaagagactga

SEQ ID NO: 2141685 - DNA, 15 bp, Homo sapiens
ttaaaagagactgag

SEQ ID NO: 2141686 - DNA, 15 bp, Homo sapiens
taaaagagactgaga

SEQ ID NO: 2141687 - DNA, 15 bp, Homo sapiens
aaaagagactgagac

SEQ ID NO: 2141688 - DNA, 15 bp, Homo sapiens
aaagagactgagaca

SEQ ID NO: 2141689 - DNA, 15 bp, Homo sapiens
aagagactgagacaa

SEQ ID NO: 2141690 - DNA, 15 bp, Homo sapiens
agagactgagacaat

SEQ ID NO: 2141691 - DNA, 15 bp, Homo sapiens
gagactgagacaata

SEQ ID NO: 2141692 - DNA, 15 bp, Homo sapiens
agactgagacaatac

SEQ ID NO: 2141693 - DNA, 15 bp, Homo sapiens
gactgagacaataca

SEQ ID NO: 2141694 - DNA, 15 bp, Homo sapiens
actgagacaatacag

SEQ ID NO: 2141695 - DNA, 15 bp, Homo sapiens
ctgagacaatacaga

SEQ ID NO: 2141696 - DNA, 15 bp, Homo sapiens
tgagacaatacagac

SEQ ID NO: 2141697 - DNA, 15 bp, Homo sapiens
gagacaatacagacc

SEQ ID NO: 2141698 - DNA, 15 bp, Homo sapiens
agacaatacagacca

SEQ ID NO: 2141699 - DNA, 15 bp, Homo sapiens
gacaatacagaccaa

SEQ ID NO: 2141700 - DNA, 15 bp, Homo sapiens
acaatacagaccaac

SEQ ID NO: 2141701 - DNA, 15 bp, Homo sapiens
caatacagaccaacc

SEQ ID NO: 2141702 - DNA, 15 bp, Homo sapiens
aatacagaccaacct

SEQ ID NO: 2141703 - DNA, 15 bp, Homo sapiens
atacagaccaacctt

SEQ ID NO: 2141704 - DNA, 15 bp, Homo sapiens
tacagaccaacctta

SEQ ID NO: 2141705 - DNA, 15 bp, Homo sapiens
acagaccaaccttac

SEQ ID NO: 2141706 - DNA, 15 bp, Homo sapiens
cagaccaaccttacc

SEQ ID NO: 2141707 - DNA, 15 bp, Homo sapiens
agaccaaccttacct

SEQ ID NO: 2141708 - DNA, 15 bp, Homo sapiens
gaccaaccttacctt

SEQ ID NO: 2141709 - DNA, 15 bp, Homo sapiens
accaaccttaccttc

SEQ ID NO: 2141710 - DNA, 15 bp, Homo sapiens
ccaaccttaccttct

SEQ ID NO: 2141711 - DNA, 15 bp, Homo sapiens
caaccttaccttctt

SEQ ID NO: 2141712 - DNA, 15 bp, Homo sapiens
aaccttaccttcttt

SEQ ID NO: 2141713 - DNA, 15 bp, Homo sapiens
accttaccttcttta

SEQ ID NO: 2141714 - DNA, 15 bp, Homo sapiens
ccttaccttctttat

SEQ ID NO: 2141715 - DNA, 15 bp, Homo sapiens
cttaccttctttata

SEQ ID NO: 2141716 - DNA, 15 bp, Homo sapiens
ttaccttctttataa

SEQ ID NO: 2141717 - DNA, 15 bp, Homo sapiens
taccttctttataac

SEQ ID NO: 2141718 - DNA, 15 bp, Homo sapiens
accttctttataacc

SEQ ID NO: 2141719 - DNA, 15 bp, Homo sapiens
ccttctttataacct

SEQ ID NO: 2141720 - DNA, 15 bp, Homo sapiens
cttctttataacctt

SEQ ID NO: 2141721 - DNA, 15 bp, Homo sapiens
ttctttataaccttc

SEQ ID NO: 2141722 - DNA, 15 bp, Homo sapiens
tctttataaccttcc

SEQ ID NO: 2141723 - DNA, 15 bp, Homo sapiens
ctttataaccttccc

SEQ ID NO: 2141724 - DNA, 15 bp, Homo sapiens
tttataaccttccct

SEQ ID NO: 2141725 - DNA, 15 bp, Homo sapiens
ttataaccttccctt

SEQ ID NO: 2141726 - DNA, 15 bp, Homo sapiens
tataaccttccctta

SEQ ID NO: 2141727 - DNA, 15 bp, Homo sapiens
ataaccttcccttag

SEQ ID NO: 2141728 - DNA, 15 bp, Homo sapiens
taaccttcccttagg

SEQ ID NO: 2141729 - DNA, 15 bp, Homo sapiens
aaccttcccttaggc

SEQ ID NO: 2141730 - DNA, 15 bp, Homo sapiens
accttcccttaggcc

SEQ ID NO: 2141731 - DNA, 15 bp, Homo sapiens
ccttcccttaggcct

SEQ ID NO: 2141732 - DNA, 15 bp, Homo sapiens
cttcccttaggcctg

SEQ ID NO: 2141733 - DNA, 15 bp, Homo sapiens
ttcccttaggcctgc

SEQ ID NO: 2141734 - DNA, 15 bp, Homo sapiens
tcccttaggcctgct

SEQ ID NO: 2141735 - DNA, 15 bp, Homo sapiens
cccttaggcctgctc

SEQ ID NO: 2141736 - DNA, 15 bp, Homo sapiens
ccttaggcctgctct

SEQ ID NO: 2141737 - DNA, 15 bp, Homo sapiens
cttaggcctgctcta

SEQ ID NO: 2141738 - DNA, 15 bp, Homo sapiens
ttaggcctgctctat

SEQ ID NO: 2141739 - DNA, 15 bp, Homo sapiens
taggcctgctctatg

SEQ ID NO: 2141740 - DNA, 15 bp, Homo sapiens
aggcctgctctatgg

SEQ ID NO: 2141741 - DNA, 15 bp, Homo sapiens
ggcctgctctatggt

SEQ ID NO: 2141742 - DNA, 15 bp, Homo sapiens
gcctgctctatggtt

SEQ ID NO: 2141743 - DNA, 15 bp, Homo sapiens
cctgctctatggttc

SEQ ID NO: 2141744 - DNA, 15 bp, Homo sapiens
ctgctctatggttca

SEQ ID NO: 2141745 - DNA, 15 bp, Homo sapiens
tgctctatggttcac

SEQ ID NO: 2141746 - DNA, 15 bp, Homo sapiens
gctctatggttcaca

SEQ ID NO: 2141747 - DNA, 15 bp, Homo sapiens
ctctatggttcacaa

SEQ ID NO: 2141748 - DNA, 15 bp, Homo sapiens
tctatggttcacaat

SEQ ID NO: 2141749 - DNA, 15 bp, Homo sapiens
ctatggttcacaata

SEQ ID NO: 2141750 - DNA, 15 bp, Homo sapiens
tatggttcacaatac

SEQ ID NO: 2141751 - DNA, 15 bp, Homo sapiens
atggttcacaataca

SEQ ID NO: 2141752 - DNA, 15 bp, Homo sapiens
tggttcacaatacag

SEQ ID NO: 2141753 - DNA, 15 bp, Homo sapiens
ggttcacaatacagg

SEQ ID NO: 2141754 - DNA, 15 bp, Homo sapiens
gttcacaatacaggt

SEQ ID NO: 2141755 - DNA, 15 bp, Homo sapiens
ttcacaatacaggtg

SEQ ID NO: 2141756 - DNA, 15 bp, Homo sapiens
tcacaatacaggtgg

SEQ ID NO: 2141757 - DNA, 15 bp, Homo sapiens
cacaatacaggtggg

SEQ ID NO: 2141758 - DNA, 15 bp, Homo sapiens
acaatacaggtggga

SEQ ID NO: 2141759 - DNA, 15 bp, Homo sapiens
caatacaggtgggaa

SEQ ID NO: 2141760 - DNA, 15 bp, Homo sapiens
aatacaggtgggaaa

SEQ ID NO: 2141761 - DNA, 15 bp, Homo sapiens
atacaggtgggaaag

SEQ ID NO: 2141762 - DNA, 15 bp, Homo sapiens
tacaggtgggaaaga

SEQ ID NO: 2141763 - DNA, 15 bp, Homo sapiens
acaggtgggaaagat

SEQ ID NO: 2141764 - DNA, 15 bp, Homo sapiens
caggtgggaaagatg

SEQ ID NO: 2141765 - DNA, 15 bp, Homo sapiens
aggtgggaaagatgt

SEQ ID NO: 2141766 - DNA, 15 bp, Homo sapiens
ggtgggaaagatgtg

SEQ ID NO: 2141767 - DNA, 15 bp, Homo sapiens
gtgggaaagatgtgc

SEQ ID NO: 2141768 - DNA, 15 bp, Homo sapiens
tgggaaagatgtgct

SEQ ID NO: 2141769 - DNA, 15 bp, Homo sapiens
gggaaagatgtgctc

SEQ ID NO: 2141770 - DNA, 15 bp, Homo sapiens
ggaaagatgtgctca

SEQ ID NO: 2141771 - DNA, 15 bp, Homo sapiens
gaaagatgtgctcag

SEQ ID NO: 2141772 - DNA, 15 bp, Homo sapiens
aaagatgtgctcaga

SEQ ID NO: 2141773 - DNA, 15 bp, Homo sapiens
aagatgtgctcagag

SEQ ID NO: 2141774 - DNA, 15 bp, Homo sapiens
agatgtgctcagaga

SEQ ID NO: 2141775 - DNA, 15 bp, Homo sapiens
gatgtgctcagagaa

SEQ ID NO: 2141776 - DNA, 15 bp, Homo sapiens
atgtgctcagagaaa

SEQ ID NO: 2141777 - DNA, 15 bp, Homo sapiens
tgtgctcagagaaat

SEQ ID NO: 2141778 - DNA, 15 bp, Homo sapiens
gtgctcagagaaatt

SEQ ID NO: 2141779 - DNA, 15 bp, Homo sapiens
tgctcagagaaatta

SEQ ID NO: 2141780 - DNA, 15 bp, Homo sapiens
ctcagagaaattagg

SEQ ID NO: 2141781 - DNA, 15 bp, Homo sapiens
tcagagaaattaggg

SEQ ID NO: 2141782 - DNA, 15 bp, Homo sapiens
cagagaaattagggc

SEQ ID NO: 2141783 - DNA, 15 bp, Homo sapiens
agagaaattagggcc

SEQ ID NO: 2141784 - DNA, 15 bp, Homo sapiens
gagaaattagggcca

SEQ ID NO: 2141785 - DNA, 15 bp, Homo sapiens
agaaattagggccaa

SEQ ID NO: 2141786 - DNA, 15 bp, Homo sapiens
gaaattagggccaac

SEQ ID NO: 2141787 - DNA, 15 bp, Homo sapiens
aaattagggccaacc

SEQ ID NO: 2141788 - DNA, 15 bp, Homo sapiens
aattagggccaacca

SEQ ID NO: 2141789 - DNA, 15 bp, Homo sapiens
attagggccaaccag

SEQ ID NO: 2141790 - DNA, 15 bp, Homo sapiens
ttagggccaaccaga

SEQ ID NO: 2141791 - DNA, 15 bp, Homo sapiens
tagggccaaccagat

SEQ ID NO: 2141792 - DNA, 15 bp, Homo sapiens
agggccaaccagatg

SEQ ID NO: 2141793 - DNA, 15 bp, Homo sapiens
gggccaaccagatgg

SEQ ID NO: 2141794 - DNA, 15 bp, Homo sapiens
ggccaaccagatggc

SEQ ID NO: 2141795 - DNA, 15 bp, Homo sapiens
gccaaccagatggct

SEQ ID NO: 2141796 - DNA, 15 bp, Homo sapiens
ccaaccagatggctg

SEQ ID NO: 2141797 - DNA, 15 bp, Homo sapiens
caaccagatggctgg

SEQ ID NO: 2141798 - DNA, 15 bp, Homo sapiens
aaccagatggctgga

SEQ ID NO: 2141799 - DNA, 15 bp, Homo sapiens
accagatggctggat

SEQ ID NO: 2141800 - DNA, 15 bp, Homo sapiens
ccagatggctggatg

SEQ ID NO: 2141801 - DNA, 15 bp, Homo sapiens
cagatggctggatgg

SEQ ID NO: 2141802 - DNA, 15 bp, Homo sapiens
agatggctggatgga

SEQ ID NO: 2141803 - DNA, 15 bp, Homo sapiens
gatggctggatggaa

SEQ ID NO: 2141804 - DNA, 15 bp, Homo sapiens
atggctggatggaaa

SEQ ID NO: 2141805 - DNA, 15 bp, Homo sapiens
tggctggatggaaaa

SEQ ID NO: 2141806 - DNA, 15 bp, Homo sapiens
ggctggatggaaaag

SEQ ID NO: 2141807 - DNA, 15 bp, Homo sapiens
gctggatggaaaaga

SEQ ID NO: 2141808 - DNA, 15 bp, Homo sapiens
ctggatggaaaagaa

SEQ ID NO: 2141809 - DNA, 15 bp, Homo sapiens
tggatggaaaagaat

SEQ ID NO: 2141810 - DNA, 15 bp, Homo sapiens
ggatggaaaagaatg

SEQ ID NO: 2141811 - DNA, 15 bp, Homo sapiens
gatggaaaagaatgt

SEQ ID NO: 2141812 - DNA, 15 bp, Homo sapiens
atggaaaagaatgtc

SEQ ID NO: 2141813 - DNA, 15 bp, Homo sapiens
tggaaaagaatgtct

SEQ ID NO: 2141814 - DNA, 15 bp, Homo sapiens
ggaaaagaatgtctt

SEQ ID NO: 2141815 - DNA, 15 bp, Homo sapiens
gaaaagaatgtctta

SEQ ID NO: 2141816 - DNA, 15 bp, Homo sapiens
aaaagaatgtcttac

SEQ ID NO: 2141817 - DNA, 15 bp, Homo sapiens
aaagaatgtcttaca

SEQ ID NO: 2141818 - DNA, 15 bp, Homo sapiens
aagaatgtcttacat

SEQ ID NO: 2141819 - DNA, 15 bp, Homo sapiens
agaatgtcttacatg

SEQ ID NO: 2141820 - DNA, 15 bp, Homo sapiens
gaatgtcttacatga

SEQ ID NO: 2141821 - DNA, 15 bp, Homo sapiens
aatgtcttacatgaa

SEQ ID NO: 2141822 - DNA, 15 bp, Homo sapiens
atgtcttacatgaaa

SEQ ID NO: 2141823 - DNA, 15 bp, Homo sapiens
tgtcttacatgaaat

SEQ ID NO: 2141824 - DNA, 15 bp, Homo sapiens
gtcttacatgaaata

SEQ ID NO: 2141825 - DNA, 15 bp, Homo sapiens
tcttacatgaaatag

SEQ ID NO: 2141826 - DNA, 15 bp, Homo sapiens
cttacatgaaatagt

SEQ ID NO: 2141827 - DNA, 15 bp, Homo sapiens
ttacatgaaatagtt

SEQ ID NO: 2141828 - DNA, 15 bp, Homo sapiens
tacatgaaatagttt

SEQ ID NO: 2141829 - DNA, 15 bp, Homo sapiens
acatgaaatagtttc

SEQ ID NO: 2141830 - DNA, 15 bp, Homo sapiens
catgaaatagtttcc

SEQ ID NO: 2141831 - DNA, 15 bp, Homo sapiens
atgaaatagtttccc

SEQ ID NO: 2141832 - DNA, 15 bp, Homo sapiens
tgaaatagtttccct

SEQ ID NO: 2141833 - DNA, 15 bp, Homo sapiens
gaaatagtttccctt

SEQ ID NO: 2141834 - DNA, 15 bp, Homo sapiens
aaatagtttcccttg

SEQ ID NO: 2141835 - DNA, 15 bp, Homo sapiens
aatagtttcccttgg

SEQ ID NO: 2141836 - DNA, 15 bp, Homo sapiens
atagtttcccttggt

SEQ ID NO: 2141837 - DNA, 15 bp, Homo sapiens
tagtttcccttggtg

SEQ ID NO: 2141838 - DNA, 15 bp, Homo sapiens
agtttcccttggtgg

SEQ ID NO: 2141839 - DNA, 15 bp, Homo sapiens
gtttcccttggtggc

SEQ ID NO: 2141840 - DNA, 15 bp, Homo sapiens
tttcccttggtggca

SEQ ID NO: 2141841 - DNA, 15 bp, Homo sapiens
ttcccttggtggcaa

SEQ ID NO: 2141842 - DNA, 15 bp, Homo sapiens
tcccttggtggcaat

SEQ ID NO: 2141843 - DNA, 15 bp, Homo sapiens
cccttggtggcaatg

SEQ ID NO: 2141844 - DNA, 15 bp, Homo sapiens
ccttggtggcaatgc

SEQ ID NO: 2141845 - DNA, 15 bp, Homo sapiens
cttggtggcaatgct

SEQ ID NO: 2141846 - DNA, 15 bp, Homo sapiens
ttggtggcaatgcta

SEQ ID NO: 2141847 - DNA, 15 bp, Homo sapiens
tggtggcaatgctag

SEQ ID NO: 2141848 - DNA, 15 bp, Homo sapiens
ggtggcaatgctagg

SEQ ID NO: 2141849 - DNA, 15 bp, Homo sapiens
gtggcaatgctaggg

SEQ ID NO: 2141850 - DNA, 15 bp, Homo sapiens
tggcaatgctaggga

SEQ ID NO: 2141851 - DNA, 15 bp, Homo sapiens
ggcaatgctagggag

SEQ ID NO: 2141852 - DNA, 15 bp, Homo sapiens
gcaatgctagggaga

SEQ ID NO: 2141853 - DNA, 15 bp, Homo sapiens
caatgctagggagag

SEQ ID NO: 2141854 - DNA, 15 bp, Homo sapiens
aatgctagggagaga

SEQ ID NO: 2141855 - DNA, 15 bp, Homo sapiens
atgctagggagagag

SEQ ID NO: 2141856 - DNA, 15 bp, Homo sapiens
tgctagggagagaga

SEQ ID NO: 2141857 - DNA, 15 bp, Homo sapiens
gctagggagagagaa

SEQ ID NO: 2141858 - DNA, 15 bp, Homo sapiens
ctagggagagagaag

SEQ ID NO: 2141859 - DNA, 15 bp, Homo sapiens
tagggagagagaaga

SEQ ID NO: 2141860 - DNA, 15 bp, Homo sapiens
agggagagagaagat

SEQ ID NO: 2141861 - DNA, 15 bp, Homo sapiens
gggagagagaagatc

SEQ ID NO: 2141862 - DNA, 15 bp, Homo sapiens
ggagagagaagatca

SEQ ID NO: 2141863 - DNA, 15 bp, Homo sapiens
gagagagaagatcaa

SEQ ID NO: 2141864 - DNA, 15 bp, Homo sapiens
agagagaagatcaat

SEQ ID NO: 2141865 - DNA, 15 bp, Homo sapiens
gagagaagatcaata

SEQ ID NO: 2141866 - DNA, 15 bp, Homo sapiens
agagaagatcaataa

SEQ ID NO: 2141867 - DNA, 15 bp, Homo sapiens
gagaagatcaataat

SEQ ID NO: 2141868 - DNA, 15 bp, Homo sapiens
agaagatcaataatg

SEQ ID NO: 2141869 - DNA, 15 bp, Homo sapiens
gaagatcaataatga

SEQ ID NO: 2141870 - DNA, 15 bp, Homo sapiens
aagatcaataatgaa

SEQ ID NO: 2141871 - DNA, 15 bp, Homo sapiens
agatcaataatgaaa

SEQ ID NO: 2141872 - DNA, 15 bp, Homo sapiens
gatcaataatgaaaa

SEQ ID NO: 2141873 - DNA, 15 bp, Homo sapiens
atcaataatgaaaaa

SEQ ID NO: 2141874 - DNA, 15 bp, Homo sapiens
tcaataatgaaaaaa

SEQ ID NO: 2141875 - DNA, 15 bp, Homo sapiens
caataatgaaaaaag

SEQ ID NO: 2141876 - DNA, 15 bp, Homo sapiens
aataatgaaaaaagt

SEQ ID NO: 2141877 - DNA, 15 bp, Homo sapiens
ataatgaaaaaagtc

SEQ ID NO: 2141878 - DNA, 15 bp, Homo sapiens
taatgaaaaaagtca

SEQ ID NO: 2141879 - DNA, 15 bp, Homo sapiens
aatgaaaaaagtcaa

SEQ ID NO: 2141880 - DNA, 15 bp, Homo sapiens
atgaaaaaagtcaaa

SEQ ID NO: 2141881 - DNA, 15 bp, Homo sapiens
tgaaaaaagtcaaaa

SEQ ID NO: 2141882 - DNA, 15 bp, Homo sapiens
gaaaaaagtcaaaag

SEQ ID NO: 2141883 - DNA, 15 bp, Homo sapiens
aaaaaagtcaaaaga

SEQ ID NO: 2141884 - DNA, 15 bp, Homo sapiens
aaaaagtcaaaagaa

SEQ ID NO: 2141885 - DNA, 15 bp, Homo sapiens
aaaagtcaaaagaac

SEQ ID NO: 2141886 - DNA, 15 bp, Homo sapiens
aaagtcaaaagaact

SEQ ID NO: 2141887 - DNA, 15 bp, Homo sapiens
aagtcaaaagaacta

SEQ ID NO: 2141888 - DNA, 15 bp, Homo sapiens
agtcaaaagaactat

SEQ ID NO: 2141889 - DNA, 15 bp, Homo sapiens
gtcaaaagaactatc

SEQ ID NO: 2141890 - DNA, 15 bp, Homo sapiens
tcaaaagaactatcc

SEQ ID NO: 2141891 - DNA, 15 bp, Homo sapiens
caaaagaactatcca

SEQ ID NO: 2141892 - DNA, 15 bp, Homo sapiens
aaaagaactatccag

SEQ ID NO: 2141893 - DNA, 15 bp, Homo sapiens
aaagaactatccagc

SEQ ID NO: 2141894 - DNA, 15 bp, Homo sapiens
aagaactatccagca

SEQ ID NO: 2141895 - DNA, 15 bp, Homo sapiens
agaactatccagcac

SEQ ID NO: 2141896 - DNA, 15 bp, Homo sapiens
gaactatccagcacc

SEQ ID NO: 2141897 - DNA, 15 bp, Homo sapiens
aactatccagcacca

SEQ ID NO: 2141898 - DNA, 15 bp, Homo sapiens
actatccagcaccag

SEQ ID NO: 2141899 - DNA, 15 bp, Homo sapiens
ctatccagcaccagc

SEQ ID NO: 2141900 - DNA, 15 bp, Homo sapiens
tatccagcaccagct

SEQ ID NO: 2141901 - DNA, 15 bp, Homo sapiens
atccagcaccagctt

SEQ ID NO: 2141902 - DNA, 15 bp, Homo sapiens
tccagcaccagctta

SEQ ID NO: 2141903 - DNA, 15 bp, Homo sapiens
ccagcaccagcttag

SEQ ID NO: 2141904 - DNA, 15 bp, Homo sapiens
cagcaccagcttagg

SEQ ID NO: 2141905 - DNA, 15 bp, Homo sapiens
agcaccagcttagga

SEQ ID NO: 2141906 - DNA, 15 bp, Homo sapiens
gcaccagcttaggaa

SEQ ID NO: 2141907 - DNA, 15 bp, Homo sapiens
caccagcttaggaag

SEQ ID NO: 2141908 - DNA, 15 bp, Homo sapiens
accagcttaggaaga

SEQ ID NO: 2141909 - DNA, 15 bp, Homo sapiens
ccagcttaggaagaa

SEQ ID NO: 2141910 - DNA, 15 bp, Homo sapiens
cagcttaggaagaaa

SEQ ID NO: 2141911 - DNA, 15 bp, Homo sapiens
agcttaggaagaaag

SEQ ID NO: 2141912 - DNA, 15 bp, Homo sapiens
gcttaggaagaaagc

SEQ ID NO: 2141913 - DNA, 15 bp, Homo sapiens
cttaggaagaaagca

SEQ ID NO: 2141914 - DNA, 15 bp, Homo sapiens
ttaggaagaaagcat

SEQ ID NO: 2141915 - DNA, 15 bp, Homo sapiens
taggaagaaagcata

SEQ ID NO: 2141916 - DNA, 15 bp, Homo sapiens
aagaaagcataggtc

SEQ ID NO: 2141917 - DNA, 15 bp, Homo sapiens
agaaagcataggtct

SEQ ID NO: 2141918 - DNA, 15 bp, Homo sapiens
gaaagcataggtctt

SEQ ID NO: 2141919 - DNA, 15 bp, Homo sapiens
aaagcataggtcttg

SEQ ID NO: 2141920 - DNA, 15 bp, Homo sapiens
aagcataggtcttgc

SEQ ID NO: 2141921 - DNA, 15 bp, Homo sapiens
agcataggtcttgca

SEQ ID NO: 2141922 - DNA, 15 bp, Homo sapiens
gcataggtcttgcaa

SEQ ID NO: 2141923 - DNA, 15 bp, Homo sapiens
cataggtcttgcaaa

SEQ ID NO: 2141924 - DNA, 15 bp, Homo sapiens
ataggtcttgcaaac

SEQ ID NO: 2141925 - DNA, 15 bp, Homo sapiens
taggtcttgcaaaca

SEQ ID NO: 2141926 - DNA, 15 bp, Homo sapiens
aggtcttgcaaacaa

SEQ ID NO: 2141927 - DNA, 15 bp, Homo sapiens
ggtcttgcaaacaag

SEQ ID NO: 2141928 - DNA, 15 bp, Homo sapiens
gtcttgcaaacaagt

SEQ ID NO: 2141929 - DNA, 15 bp, Homo sapiens
tcttgcaaacaagtc

SEQ ID NO: 2141930 - DNA, 15 bp, Homo sapiens
cttgcaaacaagtca

SEQ ID NO: 2141931 - DNA, 15 bp, Homo sapiens
ttgcaaacaagtcag

SEQ ID NO: 2141932 - DNA, 15 bp, Homo sapiens
tgcaaacaagtcaga

SEQ ID NO: 2141933 - DNA, 15 bp, Homo sapiens
gcaaacaagtcagaa

SEQ ID NO: 2141934 - DNA, 15 bp, Homo sapiens
caaacaagtcagaac

SEQ ID NO: 2141935 - DNA, 15 bp, Homo sapiens
aaacaagtcagaaca

SEQ ID NO: 2141936 - DNA, 15 bp, Homo sapiens
aacaagtcagaacaa

SEQ ID NO: 2141937 - DNA, 15 bp, Homo sapiens
acaagtcagaacaat

SEQ ID NO: 2141938 - DNA, 15 bp, Homo sapiens
caagtcagaacaatg

SEQ ID NO: 2141939 - DNA, 15 bp, Homo sapiens
aagtcagaacaatgt

SEQ ID NO: 2141940 - DNA, 15 bp, Homo sapiens
agtcagaacaatgtc

SEQ ID NO: 2141941 - DNA, 15 bp, Homo sapiens
gtcagaacaatgtct

SEQ ID NO: 2141942 - DNA, 15 bp, Homo sapiens
tcagaacaatgtcta

SEQ ID NO: 2141943 - DNA, 15 bp, Homo sapiens
cagaacaatgtctaa

SEQ ID NO: 2141944 - DNA, 15 bp, Homo sapiens
agaacaatgtctaag

SEQ ID NO: 2141945 - DNA, 15 bp, Homo sapiens
gaacaatgtctaaga

SEQ ID NO: 2141946 - DNA, 15 bp, Homo sapiens
aacaatgtctaagaa

SEQ ID NO: 2141947 - DNA, 15 bp, Homo sapiens
acaatgtctaagaat

SEQ ID NO: 2141948 - DNA, 15 bp, Homo sapiens
caatgtctaagaatt

SEQ ID NO: 2141949 - DNA, 15 bp, Homo sapiens
aatgtctaagaattt

SEQ ID NO: 2141950 - DNA, 15 bp, Homo sapiens
atgtctaagaatttg

SEQ ID NO: 2141951 - DNA, 15 bp, Homo sapiens
tgtctaagaatttgc

SEQ ID NO: 2141952 - DNA, 15 bp, Homo sapiens
gtctaagaatttgct

SEQ ID NO: 2141953 - DNA, 15 bp, Homo sapiens
tctaagaatttgcta

SEQ ID NO: 2141954 - DNA, 15 bp, Homo sapiens
ctaagaatttgctat

SEQ ID NO: 2141955 - DNA, 15 bp, Homo sapiens
taagaatttgctatg

SEQ ID NO: 2141956 - DNA, 15 bp, Homo sapiens
aagaatttgctatgt

SEQ ID NO: 2141957 - DNA, 15 bp, Homo sapiens
agaatttgctatgtt

SEQ ID NO: 2141958 - DNA, 15 bp, Homo sapiens
gaatttgctatgtta

SEQ ID NO: 2141959 - DNA, 15 bp, Homo sapiens
aatttgctatgttaa

SEQ ID NO: 2141960 - DNA, 15 bp, Homo sapiens
atttgctatgttaag

SEQ ID NO: 2141961 - DNA, 15 bp, Homo sapiens
tttgctatgttaagt

SEQ ID NO: 2141962 - DNA, 15 bp, Homo sapiens
ttgctatgttaagtt

SEQ ID NO: 2141963 - DNA, 15 bp, Homo sapiens
tgctatgttaagttt

SEQ ID NO: 2141964 - DNA, 15 bp, Homo sapiens
gctatgttaagtttt

SEQ ID NO: 2141965 - DNA, 15 bp, Homo sapiens
ctatgttaagttttt

SEQ ID NO: 2141966 - DNA, 15 bp, Homo sapiens
tatgttaagtttttt

SEQ ID NO: 2141967 - DNA, 15 bp, Homo sapiens
atgttaagttttttt

SEQ ID NO: 2141968 - DNA, 15 bp, Homo sapiens
tgttaagtttttttc

SEQ ID NO: 2141969 - DNA, 15 bp, Homo sapiens
gttaagtttttttct

SEQ ID NO: 2141970 - DNA, 15 bp, Homo sapiens
ttaagtttttttctt

SEQ ID NO: 2141971 - DNA, 15 bp, Homo sapiens
taagtttttttcttc

SEQ ID NO: 2141972 - DNA, 15 bp, Homo sapiens
aagtttttttcttcc

SEQ ID NO: 2141973 - DNA, 15 bp, Homo sapiens
agtttttttcttcca

SEQ ID NO: 2141974 - DNA, 15 bp, Homo sapiens
gtttttttcttccaa

SEQ ID NO: 2141975 - DNA, 15 bp, Homo sapiens
tttttttcttccaac

SEQ ID NO: 2141976 - DNA, 15 bp, Homo sapiens
ttttttcttccaact

SEQ ID NO: 2141977 - DNA, 15 bp, Homo sapiens
tttttcttccaactt

SEQ ID NO: 2141978 - DNA, 15 bp, Homo sapiens
ttttcttccaacttt

SEQ ID NO: 2141979 - DNA, 15 bp, Homo sapiens
tttcttccaactttt

SEQ ID NO: 2141980 - DNA, 15 bp, Homo sapiens
ttcttccaactttta

SEQ ID NO: 2141981 - DNA, 15 bp, Homo sapiens
tcttccaacttttat

SEQ ID NO: 2141982 - DNA, 15 bp, Homo sapiens
cttccaacttttatt

SEQ ID NO: 2141983 - DNA, 15 bp, Homo sapiens
ttccaacttttattt

SEQ ID NO: 2141984 - DNA, 15 bp, Homo sapiens
tccaacttttatttt

SEQ ID NO: 2141985 - DNA, 15 bp, Homo sapiens
ccaacttttatttta

SEQ ID NO: 2141986 - DNA, 15 bp, Homo sapiens
caacttttattttag

SEQ ID NO: 2141987 - DNA, 15 bp, Homo sapiens
aacttttattttagg

SEQ ID NO: 2141988 - DNA, 15 bp, Homo sapiens
acttttattttaggt

SEQ ID NO: 2141989 - DNA, 15 bp, Homo sapiens
cttttattttaggtt

SEQ ID NO: 2141990 - DNA, 15 bp, Homo sapiens
ttttattttaggttc

SEQ ID NO: 2141991 - DNA, 15 bp, Homo sapiens
tttattttaggttca

SEQ ID NO: 2141992 - DNA, 15 bp, Homo sapiens
ttattttaggttcaa

SEQ ID NO: 2141993 - DNA, 15 bp, Homo sapiens
tattttaggttcaag

SEQ ID NO: 2141994 - DNA, 15 bp, Homo sapiens
attttaggttcaagg

SEQ ID NO: 2141995 - DNA, 15 bp, Homo sapiens
ttttaggttcaaggg

SEQ ID NO: 2141996 - DNA, 15 bp, Homo sapiens
tttaggttcaagggg

SEQ ID NO: 2141997 - DNA, 15 bp, Homo sapiens
ttaggttcaaggggt

SEQ ID NO: 2141998 - DNA, 15 bp, Homo sapiens
taggttcaaggggta

SEQ ID NO: 2141999 - DNA, 15 bp, Homo sapiens
aggttcaaggggtac

SEQ ID NO: 2142000 - DNA, 15 bp, Homo sapiens
ggttcaaggggtact

SEQ ID NO: 2142001 - DNA, 15 bp, Homo sapiens
gttcaaggggtactt

SEQ ID NO: 2142002 - DNA, 15 bp, Homo sapiens
ttcaaggggtacttt

SEQ ID NO: 2142003 - DNA, 15 bp, Homo sapiens
tcaaggggtactttt

SEQ ID NO: 2142004 - DNA, 15 bp, Homo sapiens
caaggggtacttttg

SEQ ID NO: 2142005 - DNA, 15 bp, Homo sapiens
aaggggtacttttgc

SEQ ID NO: 2142006 - DNA, 15 bp, Homo sapiens
aggggtacttttgca

SEQ ID NO: 2142007 - DNA, 15 bp, Homo sapiens
ggggtacttttgcag

SEQ ID NO: 2142008 - DNA, 15 bp, Homo sapiens
gggtacttttgcagc

SEQ ID NO: 2142009 - DNA, 15 bp, Homo sapiens
ggtacttttgcagca

SEQ ID NO: 2142010 - DNA, 15 bp, Homo sapiens
gtacttttgcagcaa

SEQ ID NO: 2142011 - DNA, 15 bp, Homo sapiens
tacttttgcagcaaa

SEQ ID NO: 2142012 - DNA, 15 bp, Homo sapiens
acttttgcagcaaaa

SEQ ID NO: 2142013 - DNA, 15 bp, Homo sapiens
cttttgcagcaaaag

SEQ ID NO: 2142014 - DNA, 15 bp, Homo sapiens
ttttgcagcaaaagc

SEQ ID NO: 2142015 - DNA, 15 bp, Homo sapiens
tttgcagcaaaagcc

SEQ ID NO: 2142016 - DNA, 15 bp, Homo sapiens
ttgcagcaaaagcca

SEQ ID NO: 2142017 - DNA, 15 bp, Homo sapiens
tgcagcaaaagccaa

SEQ ID NO: 2142018 - DNA, 15 bp, Homo sapiens
gcagcaaaagccaat

SEQ ID NO: 2142019 - DNA, 15 bp, Homo sapiens
cagcaaaagccaatg

SEQ ID NO: 2142020 - DNA, 15 bp, Homo sapiens
agcaaaagccaatgg

SEQ ID NO: 2142021 - DNA, 15 bp, Homo sapiens
gcaaaagccaatggg

SEQ ID NO: 2142022 - DNA, 15 bp, Homo sapiens
caaaagccaatgggt

SEQ ID NO: 2142023 - DNA, 15 bp, Homo sapiens
aaaagccaatgggta

SEQ ID NO: 2142024 - DNA, 15 bp, Homo sapiens
aaagccaatgggtaa

SEQ ID NO: 2142025 - DNA, 15 bp, Homo sapiens
aagccaatgggtaaa

SEQ ID NO: 2142026 - DNA, 15 bp, Homo sapiens
agccaatgggtaaat

SEQ ID NO: 2142027 - DNA, 15 bp, Homo sapiens
gccaatgggtaaatt

SEQ ID NO: 2142028 - DNA, 15 bp, Homo sapiens
ccaatgggtaaattt

SEQ ID NO: 2142029 - DNA, 15 bp, Homo sapiens
caatgggtaaatttc

SEQ ID NO: 2142030 - DNA, 15 bp, Homo sapiens
aatgggtaaatttcc

SEQ ID NO: 2142031 - DNA, 15 bp, Homo sapiens
atgggtaaatttcca

SEQ ID NO: 2142032 - DNA, 15 bp, Homo sapiens
tgggtaaatttccat

SEQ ID NO: 2142033 - DNA, 15 bp, Homo sapiens
gggtaaatttccatg

SEQ ID NO: 2142034 - DNA, 15 bp, Homo sapiens
ggtaaatttccatgg

SEQ ID NO: 2142035 - DNA, 15 bp, Homo sapiens
gtaaatttccatggg

SEQ ID NO: 2142036 - DNA, 15 bp, Homo sapiens
taaatttccatgggt

SEQ ID NO: 2142037 - DNA, 15 bp, Homo sapiens
aaatttccatgggta

SEQ ID NO: 2142038 - DNA, 15 bp, Homo sapiens
aatttccatgggtaa

SEQ ID NO: 2142039 - DNA, 15 bp, Homo sapiens
atttccatgggtaaa

SEQ ID NO: 2142040 - DNA, 15 bp, Homo sapiens
tttccatgggtaaat

SEQ ID NO: 2142041 - DNA, 15 bp, Homo sapiens
ttccatgggtaaatt

SEQ ID NO: 2142042 - DNA, 15 bp, Homo sapiens
tccatgggtaaattg

SEQ ID NO: 2142043 - DNA, 15 bp, Homo sapiens
ccatgggtaaattgt

SEQ ID NO: 2142044 - DNA, 15 bp, Homo sapiens
catgggtaaattgtg

SEQ ID NO: 2142045 - DNA, 15 bp, Homo sapiens
atgggtaaattgtgt

SEQ ID NO: 2142046 - DNA, 15 bp, Homo sapiens
tgggtaaattgtgtg

SEQ ID NO: 2142047 - DNA, 15 bp, Homo sapiens
gggtaaattgtgtgt

SEQ ID NO: 2142048 - DNA, 15 bp, Homo sapiens
ggtaaattgtgtgtc

SEQ ID NO: 2142049 - DNA, 15 bp, Homo sapiens
gtaaattgtgtgtca

SEQ ID NO: 2142050 - DNA, 15 bp, Homo sapiens
taaattgtgtgtcat

SEQ ID NO: 2142051 - DNA, 15 bp, Homo sapiens
aaattgtgtgtcatg

SEQ ID NO: 2142052 - DNA, 15 bp, Homo sapiens
aattgtgtgtcatgg

SEQ ID NO: 2142053 - DNA, 15 bp, Homo sapiens
attgtgtgtcatggg

SEQ ID NO: 2142054 - DNA, 15 bp, Homo sapiens
ttgtgtgtcatgggc

SEQ ID NO: 2142055 - DNA, 15 bp, Homo sapiens
tgtgtgtcatgggct

SEQ ID NO: 2142056 - DNA, 15 bp, Homo sapiens
gtgtgtcatgggctt

SEQ ID NO: 2142057 - DNA, 15 bp, Homo sapiens
tgtgtcatgggcttt

SEQ ID NO: 2142058 - DNA, 15 bp, Homo sapiens
gtgtcatgggctttg

SEQ ID NO: 2142059 - DNA, 15 bp, Homo sapiens
tgtcatgggctttga

SEQ ID NO: 2142060 - DNA, 15 bp, Homo sapiens
gtcatgggctttgat

SEQ ID NO: 2142061 - DNA, 15 bp, Homo sapiens
tcatgggctttgatg

SEQ ID NO: 2142062 - DNA, 15 bp, Homo sapiens
catgggctttgatgt

SEQ ID NO: 2142063 - DNA, 15 bp, Homo sapiens
atgggctttgatgta

SEQ ID NO: 2142064 - DNA, 15 bp, Homo sapiens
tgggctttgatgtac

SEQ ID NO: 2142065 - DNA, 15 bp, Homo sapiens
gggctttgatgtaca

SEQ ID NO: 2142066 - DNA, 15 bp, Homo sapiens
ggctttgatgtacaa

SEQ ID NO: 2142067 - DNA, 15 bp, Homo sapiens
gctttgatgtacaaa

SEQ ID NO: 2142068 - DNA, 15 bp, Homo sapiens
ctttgatgtacaaat

SEQ ID NO: 2142069 - DNA, 15 bp, Homo sapiens
tttgatgtacaaatg

SEQ ID NO: 2142070 - DNA, 15 bp, Homo sapiens
ttgatgtacaaatga

SEQ ID NO: 2142071 - DNA, 15 bp, Homo sapiens
tgatgtacaaatgat

SEQ ID NO: 2142072 - DNA, 15 bp, Homo sapiens
gatgtacaaatgatt

SEQ ID NO: 2142073 - DNA, 15 bp, Homo sapiens
atgtacaaatgattt

SEQ ID NO: 2142074 - DNA, 15 bp, Homo sapiens
tgtacaaatgatttc

SEQ ID NO: 2142075 - DNA, 15 bp, Homo sapiens
gtacaaatgatttca

SEQ ID NO: 2142076 - DNA, 15 bp, Homo sapiens
tacaaatgatttcat

SEQ ID NO: 2142077 - DNA, 15 bp, Homo sapiens
acaaatgatttcatt

SEQ ID NO: 2142078 - DNA, 15 bp, Homo sapiens
caaatgatttcatta

SEQ ID NO: 2142079 - DNA, 15 bp, Homo sapiens
aaatgatttcattac

SEQ ID NO: 2142080 - DNA, 15 bp, Homo sapiens
aatgatttcattaca

SEQ ID NO: 2142081 - DNA, 15 bp, Homo sapiens
atgatttcattacac

SEQ ID NO: 2142082 - DNA, 15 bp, Homo sapiens
tgatttcattacact

SEQ ID NO: 2142083 - DNA, 15 bp, Homo sapiens
gatttcattacactg

SEQ ID NO: 2142084 - DNA, 15 bp, Homo sapiens
atttcattacactgg

SEQ ID NO: 2142085 - DNA, 15 bp, Homo sapiens
tttcattacactggt

SEQ ID NO: 2142086 - DNA, 15 bp, Homo sapiens
ttcattacactggta

SEQ ID NO: 2142087 - DNA, 15 bp, Homo sapiens
tcattacactggtag

SEQ ID NO: 2142088 - DNA, 15 bp, Homo sapiens
cattacactggtagt

SEQ ID NO: 2142089 - DNA, 15 bp, Homo sapiens
attacactggtagtg

SEQ ID NO: 2142090 - DNA, 15 bp, Homo sapiens
ttacactggtagtga

SEQ ID NO: 2142091 - DNA, 15 bp, Homo sapiens
tacactggtagtgag

SEQ ID NO: 2142092 - DNA, 15 bp, Homo sapiens
acactggtagtgagc

SEQ ID NO: 2142093 - DNA, 15 bp, Homo sapiens
cactggtagtgagca

SEQ ID NO: 2142094 - DNA, 15 bp, Homo sapiens
actggtagtgagcat

SEQ ID NO: 2142095 - DNA, 15 bp, Homo sapiens
ctggtagtgagcata

SEQ ID NO: 2142096 - DNA, 15 bp, Homo sapiens
tggtagtgagcatag

SEQ ID NO: 2142097 - DNA, 15 bp, Homo sapiens
ggtagtgagcatagt

SEQ ID NO: 2142098 - DNA, 15 bp, Homo sapiens
gtagtgagcatagta

SEQ ID NO: 2142099 - DNA, 15 bp, Homo sapiens
tagtgagcatagtac

SEQ ID NO: 2142100 - DNA, 15 bp, Homo sapiens
agtgagcatagtacc

SEQ ID NO: 2142101 - DNA, 15 bp, Homo sapiens
gtgagcatagtacct

SEQ ID NO: 2142102 - DNA, 15 bp, Homo sapiens
tgagcatagtacctg

SEQ ID NO: 2142103 - DNA, 15 bp, Homo sapiens
gagcatagtacctga

SEQ ID NO: 2142104 - DNA, 15 bp, Homo sapiens
agcatagtacctgat

SEQ ID NO: 2142105 - DNA, 15 bp, Homo sapiens
gcatagtacctgata

SEQ ID NO: 2142106 - DNA, 15 bp, Homo sapiens
catagtacctgatag

SEQ ID NO: 2142107 - DNA, 15 bp, Homo sapiens
atagtacctgatagg

SEQ ID NO: 2142108 - DNA, 15 bp, Homo sapiens
tagtacctgataggt

SEQ ID NO: 2142109 - DNA, 15 bp, Homo sapiens
agtacctgataggta

SEQ ID NO: 2142110 - DNA, 15 bp, Homo sapiens
gtacctgataggtag

SEQ ID NO: 2142111 - DNA, 15 bp, Homo sapiens
tacctgataggtaga

SEQ ID NO: 2142112 - DNA, 15 bp, Homo sapiens
acctgataggtagat

SEQ ID NO: 2142113 - DNA, 15 bp, Homo sapiens
cctgataggtagatt

SEQ ID NO: 2142114 - DNA, 15 bp, Homo sapiens
ctgataggtagattt

SEQ ID NO: 2142115 - DNA, 15 bp, Homo sapiens
tgataggtagatttt

SEQ ID NO: 2142116 - DNA, 15 bp, Homo sapiens
gataggtagattttt

SEQ ID NO: 2142117 - DNA, 15 bp, Homo sapiens
ataggtagatttttt

SEQ ID NO: 2142118 - DNA, 15 bp, Homo sapiens
taggtagattttttg

SEQ ID NO: 2142119 - DNA, 15 bp, Homo sapiens
aggtagattttttga

SEQ ID NO: 2142120 - DNA, 15 bp, Homo sapiens
ggtagattttttgat

SEQ ID NO: 2142121 - DNA, 15 bp, Homo sapiens
gtagattttttgatc

SEQ ID NO: 2142122 - DNA, 15 bp, Homo sapiens
tagattttttgatcc

SEQ ID NO: 2142123 - DNA, 15 bp, Homo sapiens
agattttttgatcct

SEQ ID NO: 2142124 - DNA, 15 bp, Homo sapiens
gattttttgatcctc

SEQ ID NO: 2142125 - DNA, 15 bp, Homo sapiens
attttttgatcctca

SEQ ID NO: 2142126 - DNA, 15 bp, Homo sapiens
ttttttgatcctcac

SEQ ID NO: 2142127 - DNA, 15 bp, Homo sapiens
tttttgatcctcact

SEQ ID NO: 2142128 - DNA, 15 bp, Homo sapiens
ttttgatcctcactc

SEQ ID NO: 2142129 - DNA, 15 bp, Homo sapiens
tttgatcctcactct

SEQ ID NO: 2142130 - DNA, 15 bp, Homo sapiens
ttgatcctcactctc

SEQ ID NO: 2142131 - DNA, 15 bp, Homo sapiens
tgatcctcactctcc

SEQ ID NO: 2142132 - DNA, 15 bp, Homo sapiens
gatcctcactctcct

SEQ ID NO: 2142133 - DNA, 15 bp, Homo sapiens
atcctcactctcctc

SEQ ID NO: 2142134 - DNA, 15 bp, Homo sapiens
tcctcactctcctcc

SEQ ID NO: 2142135 - DNA, 15 bp, Homo sapiens
cctcactctcctccc

SEQ ID NO: 2142136 - DNA, 15 bp, Homo sapiens
ctcactctcctccca

SEQ ID NO: 2142137 - DNA, 15 bp, Homo sapiens
tcactctcctcccat

SEQ ID NO: 2142138 - DNA, 15 bp, Homo sapiens
cactctcctcccatc

SEQ ID NO: 2142139 - DNA, 15 bp, Homo sapiens
actctcctcccatcc

SEQ ID NO: 2142140 - DNA, 15 bp, Homo sapiens
ctctcctcccatcct

SEQ ID NO: 2142141 - DNA, 15 bp, Homo sapiens
tctcctcccatccta

SEQ ID NO: 2142142 - DNA, 15 bp, Homo sapiens
ctcctcccatcctat

SEQ ID NO: 2142143 - DNA, 15 bp, Homo sapiens
tcctcccatcctatg

SEQ ID NO: 2142144 - DNA, 15 bp, Homo sapiens
cctcccatcctatgt

SEQ ID NO: 2142145 - DNA, 15 bp, Homo sapiens
ctcccatcctatgtt

SEQ ID NO: 2142146 - DNA, 15 bp, Homo sapiens
tcccatcctatgtta

SEQ ID NO: 2142147 - DNA, 15 bp, Homo sapiens
cccatcctatgttaa

SEQ ID NO: 2142148 - DNA, 15 bp, Homo sapiens
ccatcctatgttaat

SEQ ID NO: 2142149 - DNA, 15 bp, Homo sapiens
catcctatgttaatc

SEQ ID NO: 2142150 - DNA, 15 bp, Homo sapiens
atcctatgttaatct

SEQ ID NO: 2142151 - DNA, 15 bp, Homo sapiens
tcctatgttaatctt

SEQ ID NO: 2142152 - DNA, 15 bp, Homo sapiens
cctatgttaatcttt

SEQ ID NO: 2142153 - DNA, 15 bp, Homo sapiens
ctatgttaatctttt

SEQ ID NO: 2142154 - DNA, 15 bp, Homo sapiens
tatgttaatctttta

SEQ ID NO: 2142155 - DNA, 15 bp, Homo sapiens
atgttaatcttttaa

SEQ ID NO: 2142156 - DNA, 15 bp, Homo sapiens
tgttaatcttttaac

SEQ ID NO: 2142157 - DNA, 15 bp, Homo sapiens
gttaatcttttaaca

SEQ ID NO: 2142158 - DNA, 15 bp, Homo sapiens
ttaatcttttaacat

SEQ ID NO: 2142159 - DNA, 15 bp, Homo sapiens
taatcttttaacatc

SEQ ID NO: 2142160 - DNA, 15 bp, Homo sapiens
aatcttttaacatct

SEQ ID NO: 2142161 - DNA, 15 bp, Homo sapiens
atcttttaacatctt

SEQ ID NO: 2142162 - DNA, 15 bp, Homo sapiens
tcttttaacatcttt

SEQ ID NO: 2142163 - DNA, 15 bp, Homo sapiens
cttttaacatctttg

SEQ ID NO: 2142164 - DNA, 15 bp, Homo sapiens
ttttaacatctttgg

SEQ ID NO: 2142165 - DNA, 15 bp, Homo sapiens
tttaacatctttgga

SEQ ID NO: 2142166 - DNA, 15 bp, Homo sapiens
ttaacatctttggaa

SEQ ID NO: 2142167 - DNA, 15 bp, Homo sapiens
taacatctttggaaa

SEQ ID NO: 2142168 - DNA, 15 bp, Homo sapiens
aacatctttggaaaa

SEQ ID NO: 2142169 - DNA, 15 bp, Homo sapiens
acatctttggaaaat

SEQ ID NO: 2142170 - DNA, 15 bp, Homo sapiens
catctttggaaaata

SEQ ID NO: 2142171 - DNA, 15 bp, Homo sapiens
atctttggaaaataa

SEQ ID NO: 2142172 - DNA, 15 bp, Homo sapiens
tctttggaaaataag

SEQ ID NO: 2142173 - DNA, 15 bp, Homo sapiens
ctttggaaaataaga

SEQ ID NO: 2142174 - DNA, 15 bp, Homo sapiens
tttggaaaataagaa

SEQ ID NO: 2142175 - DNA, 15 bp, Homo sapiens
ttggaaaataagaat

SEQ ID NO: 2142176 - DNA, 15 bp, Homo sapiens
tggaaaataagaatt

SEQ ID NO: 2142177 - DNA, 15 bp, Homo sapiens
ggaaaataagaattg

SEQ ID NO: 2142178 - DNA, 15 bp, Homo sapiens
gaaaataagaattgg

SEQ ID NO: 2142179 - DNA, 15 bp, Homo sapiens
aaaataagaattggc

SEQ ID NO: 2142180 - DNA, 15 bp, Homo sapiens
aaataagaattggca

SEQ ID NO: 2142181 - DNA, 15 bp, Homo sapiens
aataagaattggcac

SEQ ID NO: 2142182 - DNA, 15 bp, Homo sapiens
ataagaattggcact

SEQ ID NO: 2142183 - DNA, 15 bp, Homo sapiens
taagaattggcacta

SEQ ID NO: 2142184 - DNA, 15 bp, Homo sapiens
aagaattggcactag

SEQ ID NO: 2142185 - DNA, 15 bp, Homo sapiens
agaattggcactagc

SEQ ID NO: 2142186 - DNA, 15 bp, Homo sapiens
gaattggcactagct

SEQ ID NO: 2142187 - DNA, 15 bp, Homo sapiens
aattggcactagctt

SEQ ID NO: 2142188 - DNA, 15 bp, Homo sapiens
attggcactagctta

SEQ ID NO: 2142189 - DNA, 15 bp, Homo sapiens
ttggcactagcttat

SEQ ID NO: 2142190 - DNA, 15 bp, Homo sapiens
tggcactagcttatg

SEQ ID NO: 2142191 - DNA, 15 bp, Homo sapiens
ggcactagcttatgc

SEQ ID NO: 2142192 - DNA, 15 bp, Homo sapiens
gcactagcttatgca

SEQ ID NO: 2142193 - DNA, 15 bp, Homo sapiens
cactagcttatgcat

SEQ ID NO: 2142194 - DNA, 15 bp, Homo sapiens
actagcttatgcatt

SEQ ID NO: 2142195 - DNA, 15 bp, Homo sapiens
ctagcttatgcattc

SEQ ID NO: 2142196 - DNA, 15 bp, Homo sapiens
tagcttatgcattcc

SEQ ID NO: 2142197 - DNA, 15 bp, Homo sapiens
agcttatgcattcca

SEQ ID NO: 2142198 - DNA, 15 bp, Homo sapiens
gcttatgcattccag

SEQ ID NO: 2142199 - DNA, 15 bp, Homo sapiens
cttatgcattccagt

SEQ ID NO: 2142200 - DNA, 15 bp, Homo sapiens
ttatgcattccagta

SEQ ID NO: 2142201 - DNA, 15 bp, Homo sapiens
tatgcattccagtag

SEQ ID NO: 2142202 - DNA, 15 bp, Homo sapiens
atgcattccagtagc

SEQ ID NO: 2142203 - DNA, 15 bp, Homo sapiens
tgcattccagtagcc

SEQ ID NO: 2142204 - DNA, 15 bp, Homo sapiens
gcattccagtagccc

SEQ ID NO: 2142205 - DNA, 15 bp, Homo sapiens
cattccagtagccca

SEQ ID NO: 2142206 - DNA, 15 bp, Homo sapiens
attccagtagcccat

SEQ ID NO: 2142207 - DNA, 15 bp, Homo sapiens
ttccagtagcccatc

SEQ ID NO: 2142208 - DNA, 15 bp, Homo sapiens
tccagtagcccatct

SEQ ID NO: 2142209 - DNA, 15 bp, Homo sapiens
ccagtagcccatcta

SEQ ID NO: 2142210 - DNA, 15 bp, Homo sapiens
cagtagcccatctac

SEQ ID NO: 2142211 - DNA, 15 bp, Homo sapiens
agtagcccatctaca

SEQ ID NO: 2142212 - DNA, 15 bp, Homo sapiens
gtagcccatctacat

SEQ ID NO: 2142213 - DNA, 15 bp, Homo sapiens
tagcccatctacata

SEQ ID NO: 2142214 - DNA, 15 bp, Homo sapiens
agcccatctacataa

SEQ ID NO: 2142215 - DNA, 15 bp, Homo sapiens
gcccatctacataaa

SEQ ID NO: 2142216 - DNA, 15 bp, Homo sapiens
cccatctacataaaa

SEQ ID NO: 2142217 - DNA, 15 bp, Homo sapiens
ccatctacataaaac

SEQ ID NO: 2142218 - DNA, 15 bp, Homo sapiens
catctacataaaacc

SEQ ID NO: 2142219 - DNA, 15 bp, Homo sapiens
atctacataaaacca

SEQ ID NO: 2142220 - DNA, 15 bp, Homo sapiens
tctacataaaaccag

SEQ ID NO: 2142221 - DNA, 15 bp, Homo sapiens
ctacataaaaccagt

SEQ ID NO: 2142222 - DNA, 15 bp, Homo sapiens
tacataaaaccagtg

SEQ ID NO: 2142223 - DNA, 15 bp, Homo sapiens
acataaaaccagtga

SEQ ID NO: 2142224 - DNA, 15 bp, Homo sapiens
cataaaaccagtgag

SEQ ID NO: 2142225 - DNA, 15 bp, Homo sapiens
ataaaaccagtgagg

SEQ ID NO: 2142226 - DNA, 15 bp, Homo sapiens
taaaaccagtgaggg

SEQ ID NO: 2142227 - DNA, 15 bp, Homo sapiens
aaaaccagtgagggg

SEQ ID NO: 2142228 - DNA, 15 bp, Homo sapiens
aaaccagtgaggggg

SEQ ID NO: 2142229 - DNA, 15 bp, Homo sapiens
aaccagtgagggggc

SEQ ID NO: 2142230 - DNA, 15 bp, Homo sapiens
accagtgagggggcc

SEQ ID NO: 2142231 - DNA, 15 bp, Homo sapiens
ccagtgagggggcct

SEQ ID NO: 2142232 - DNA, 15 bp, Homo sapiens
cagtgagggggcctc

SEQ ID NO: 2142233 - DNA, 15 bp, Homo sapiens
agtgagggggcctca

SEQ ID NO: 2142234 - DNA, 15 bp, Homo sapiens
gtgagggggcctcat

SEQ ID NO: 2142235 - DNA, 15 bp, Homo sapiens
tgagggggcctcatg

SEQ ID NO: 2142236 - DNA, 15 bp, Homo sapiens
gagggggcctcatga

SEQ ID NO: 2142237 - DNA, 15 bp, Homo sapiens
agggggcctcatgat

SEQ ID NO: 2142238 - DNA, 15 bp, Homo sapiens
gggggcctcatgata

SEQ ID NO: 2142239 - DNA, 15 bp, Homo sapiens
ggggcctcatgatat

SEQ ID NO: 2142240 - DNA, 15 bp, Homo sapiens
gggcctcatgatatc

SEQ ID NO: 2142241 - DNA, 15 bp, Homo sapiens
ggcctcatgatatca

SEQ ID NO: 2142242 - DNA, 15 bp, Homo sapiens
gcctcatgatatcaa

SEQ ID NO: 2142243 - DNA, 15 bp, Homo sapiens
cctcatgatatcaag

SEQ ID NO: 2142244 - DNA, 15 bp, Homo sapiens
ctcatgatatcaaga

SEQ ID NO: 2142245 - DNA, 15 bp, Homo sapiens
tcatgatatcaagat

SEQ ID NO: 2142246 - DNA, 15 bp, Homo sapiens
catgatatcaagata

SEQ ID NO: 2142247 - DNA, 15 bp, Homo sapiens
atgatatcaagatag

SEQ ID NO: 2142248 - DNA, 15 bp, Homo sapiens
tgatatcaagatagt

SEQ ID NO: 2142249 - DNA, 15 bp, Homo sapiens
gatatcaagatagtg

SEQ ID NO: 2142250 - DNA, 15 bp, Homo sapiens
atatcaagatagtgg

SEQ ID NO: 2142251 - DNA, 15 bp, Homo sapiens
tatcaagatagtgga

SEQ ID NO: 2142252 - DNA, 15 bp, Homo sapiens
atcaagatagtggac

SEQ ID NO: 2142253 - DNA, 15 bp, Homo sapiens
tcaagatagtggact

SEQ ID NO: 2142254 - DNA, 15 bp, Homo sapiens
caagatagtggactt

SEQ ID NO: 2142255 - DNA, 15 bp, Homo sapiens
aagatagtggactta

SEQ ID NO: 2142256 - DNA, 15 bp, Homo sapiens
agatagtggacttaa

SEQ ID NO: 2142257 - DNA, 15 bp, Homo sapiens
gatagtggacttaaa

SEQ ID NO: 2142258 - DNA, 15 bp, Homo sapiens
atagtggacttaaaa

SEQ ID NO: 2142259 - DNA, 15 bp, Homo sapiens
tagtggacttaaaag

SEQ ID NO: 2142260 - DNA, 15 bp, Homo sapiens
agtggacttaaaaga

SEQ ID NO: 2142261 - DNA, 15 bp, Homo sapiens
gtggacttaaaagaa

SEQ ID NO: 2142262 - DNA, 15 bp, Homo sapiens
tggacttaaaagaaa

SEQ ID NO: 2142263 - DNA, 15 bp, Homo sapiens
ggacttaaaagaaat

SEQ ID NO: 2142264 - DNA, 15 bp, Homo sapiens
gacttaaaagaaatg

SEQ ID NO: 2142265 - DNA, 15 bp, Homo sapiens
acttaaaagaaatgg

SEQ ID NO: 2142266 - DNA, 15 bp, Homo sapiens
cttaaaagaaatggg

SEQ ID NO: 2142267 - DNA, 15 bp, Homo sapiens
ttaaaagaaatggga

SEQ ID NO: 2142268 - DNA, 15 bp, Homo sapiens
taaaagaaatgggat

SEQ ID NO: 2142269 - DNA, 15 bp, Homo sapiens
aaaagaaatgggata

SEQ ID NO: 2142270 - DNA, 15 bp, Homo sapiens
aaagaaatgggatac

SEQ ID NO: 2142271 - DNA, 15 bp, Homo sapiens
aagaaatgggatacg

SEQ ID NO: 2142272 - DNA, 15 bp, Homo sapiens
agaaatgggatacgt

SEQ ID NO: 2142273 - DNA, 15 bp, Homo sapiens
gaaatgggatacgta

SEQ ID NO: 2142274 - DNA, 15 bp, Homo sapiens
aaatgggatacgtac

SEQ ID NO: 2142275 - DNA, 15 bp, Homo sapiens
aatgggatacgtact

SEQ ID NO: 2142276 - DNA, 15 bp, Homo sapiens
atgggatacgtactg

SEQ ID NO: 2142277 - DNA, 15 bp, Homo sapiens
tgggatacgtactgt

SEQ ID NO: 2142278 - DNA, 15 bp, Homo sapiens
gggatacgtactgtt

SEQ ID NO: 2142279 - DNA, 15 bp, Homo sapiens
ggatacgtactgttc

SEQ ID NO: 2142280 - DNA, 15 bp, Homo sapiens
gatacgtactgttca

SEQ ID NO: 2142281 - DNA, 15 bp, Homo sapiens
atacgtactgttcat

SEQ ID NO: 2142282 - DNA, 15 bp, Homo sapiens
tacgtactgttcatc

SEQ ID NO: 2142283 - DNA, 15 bp, Homo sapiens
acgtactgttcatct

SEQ ID NO: 2142284 - DNA, 15 bp, Homo sapiens
cgtactgttcatctt

SEQ ID NO: 2142285 - DNA, 15 bp, Homo sapiens
gtactgttcatcttg

SEQ ID NO: 2142286 - DNA, 15 bp, Homo sapiens
tactgttcatcttgt

SEQ ID NO: 2142287 - DNA, 15 bp, Homo sapiens
actgttcatcttgtt

SEQ ID NO: 2142288 - DNA, 15 bp, Homo sapiens
ctgttcatcttgttt

SEQ ID NO: 2142289 - DNA, 15 bp, Homo sapiens
tgttcatcttgttta

SEQ ID NO: 2142290 - DNA, 15 bp, Homo sapiens
gttcatcttgtttag

SEQ ID NO: 2142291 - DNA, 15 bp, Homo sapiens
ttcatcttgtttagt

SEQ ID NO: 2142292 - DNA, 15 bp, Homo sapiens
tcatcttgtttagtc

SEQ ID NO: 2142293 - DNA, 15 bp, Homo sapiens
catcttgtttagtcc

SEQ ID NO: 2142294 - DNA, 15 bp, Homo sapiens
atcttgtttagtccc

SEQ ID NO: 2142295 - DNA, 15 bp, Homo sapiens
tcttgtttagtccct

SEQ ID NO: 2142296 - DNA, 15 bp, Homo sapiens
cttgtttagtccctt

SEQ ID NO: 2142297 - DNA, 15 bp, Homo sapiens
ttgtttagtcccttt

SEQ ID NO: 2142298 - DNA, 15 bp, Homo sapiens
tgtttagtccctttg

SEQ ID NO: 2142299 - DNA, 15 bp, Homo sapiens
gtttagtccctttgt

SEQ ID NO: 2142300 - DNA, 15 bp, Homo sapiens
tttagtccctttgtg

SEQ ID NO: 2142301 - DNA, 15 bp, Homo sapiens
ttagtccctttgtgt

SEQ ID NO: 2142302 - DNA, 15 bp, Homo sapiens
tagtccctttgtgtt

SEQ ID NO: 2142303 - DNA, 15 bp, Homo sapiens
agtccctttgtgttt

SEQ ID NO: 2142304 - DNA, 15 bp, Homo sapiens
gtccctttgtgtttg

SEQ ID NO: 2142305 - DNA, 15 bp, Homo sapiens
tccctttgtgtttgt

SEQ ID NO: 2142306 - DNA, 15 bp, Homo sapiens
ccctttgtgtttgtt

SEQ ID NO: 2142307 - DNA, 15 bp, Homo sapiens
cctttgtgtttgttt

SEQ ID NO: 2142308 - DNA, 15 bp, Homo sapiens
ctttgtgtttgtttt

SEQ ID NO: 2142309 - DNA, 15 bp, Homo sapiens
tttgtgtttgttttt

SEQ ID NO: 2142310 - DNA, 15 bp, Homo sapiens
ttgtgtttgtttttc

SEQ ID NO: 2142311 - DNA, 15 bp, Homo sapiens
tgtgtttgtttttca

SEQ ID NO: 2142312 - DNA, 15 bp, Homo sapiens
gtgtttgtttttcag

SEQ ID NO: 2142313 - DNA, 15 bp, Homo sapiens
tgtttgtttttcagt

SEQ ID NO: 2142314 - DNA, 15 bp, Homo sapiens
gtttgtttttcagtg

SEQ ID NO: 2142315 - DNA, 15 bp, Homo sapiens
tttgtttttcagtgt

SEQ ID NO: 2142316 - DNA, 15 bp, Homo sapiens
ttgtttttcagtgtc

SEQ ID NO: 2142317 - DNA, 15 bp, Homo sapiens
tgtttttcagtgtcc

SEQ ID NO: 2142318 - DNA, 15 bp, Homo sapiens
gtttttcagtgtcct

SEQ ID NO: 2142319 - DNA, 15 bp, Homo sapiens
tttttcagtgtccta

SEQ ID NO: 2142320 - DNA, 15 bp, Homo sapiens
ttttcagtgtcctaa

SEQ ID NO: 2142321 - DNA, 15 bp, Homo sapiens
tttcagtgtcctaaa

SEQ ID NO: 2142322 - DNA, 15 bp, Homo sapiens
ttcagtgtcctaaag

SEQ ID NO: 2142323 - DNA, 15 bp, Homo sapiens
tcagtgtcctaaagt

SEQ ID NO: 2142324 - DNA, 15 bp, Homo sapiens
cagtgtcctaaagtg

SEQ ID NO: 2142325 - DNA, 15 bp, Homo sapiens
agtgtcctaaagtgg

SEQ ID NO: 2142326 - DNA, 15 bp, Homo sapiens
gtgtcctaaagtgga

SEQ ID NO: 2142327 - DNA, 15 bp, Homo sapiens
tgtcctaaagtggat

SEQ ID NO: 2142328 - DNA, 15 bp, Homo sapiens
gtcctaaagtggata

SEQ ID NO: 2142329 - DNA, 15 bp, Homo sapiens
tcctaaagtggatat

SEQ ID NO: 2142330 - DNA, 15 bp, Homo sapiens
cctaaagtggatatt

SEQ ID NO: 2142331 - DNA, 15 bp, Homo sapiens
ctaaagtggatatta

SEQ ID NO: 2142332 - DNA, 15 bp, Homo sapiens
taaagtggatattaa

SEQ ID NO: 2142333 - DNA, 15 bp, Homo sapiens
aaagtggatattaag

SEQ ID NO: 2142334 - DNA, 15 bp, Homo sapiens
aagtggatattaagc

SEQ ID NO: 2142335 - DNA, 15 bp, Homo sapiens
agtggatattaagca

SEQ ID NO: 2142336 - DNA, 15 bp, Homo sapiens
gtggatattaagcaa

SEQ ID NO: 2142337 - DNA, 15 bp, Homo sapiens
tggatattaagcaag

SEQ ID NO: 2142338 - DNA, 15 bp, Homo sapiens
ggatattaagcaagc

SEQ ID NO: 2142339 - DNA, 15 bp, Homo sapiens
gatattaagcaagct

SEQ ID NO: 2142340 - DNA, 15 bp, Homo sapiens
atattaagcaagctg

SEQ ID NO: 2142341 - DNA, 15 bp, Homo sapiens
tattaagcaagctga

SEQ ID NO: 2142342 - DNA, 15 bp, Homo sapiens
attaagcaagctgag

SEQ ID NO: 2142343 - DNA, 15 bp, Homo sapiens
ttaagcaagctgaga

SEQ ID NO: 2142344 - DNA, 15 bp, Homo sapiens
taagcaagctgagag

SEQ ID NO: 2142345 - DNA, 15 bp, Homo sapiens
aagcaagctgagagt

SEQ ID NO: 2142346 - DNA, 15 bp, Homo sapiens
agcaagctgagagta

SEQ ID NO: 2142347 - DNA, 15 bp, Homo sapiens
gcaagctgagagtaa

SEQ ID NO: 2142348 - DNA, 15 bp, Homo sapiens
caagctgagagtaat

SEQ ID NO: 2142349 - DNA, 15 bp, Homo sapiens
aagctgagagtaatt

SEQ ID NO: 2142350 - DNA, 15 bp, Homo sapiens
agctgagagtaattt

SEQ ID NO: 2142351 - DNA, 15 bp, Homo sapiens
gctgagagtaatttg

SEQ ID NO: 2142352 - DNA, 15 bp, Homo sapiens
ctgagagtaatttga

SEQ ID NO: 2142353 - DNA, 15 bp, Homo sapiens
tgagagtaatttgag

SEQ ID NO: 2142354 - DNA, 15 bp, Homo sapiens
gagagtaatttgagt

SEQ ID NO: 2142355 - DNA, 15 bp, Homo sapiens
agagtaatttgagta

SEQ ID NO: 2142356 - DNA, 15 bp, Homo sapiens
gagtaatttgagtac

SEQ ID NO: 2142357 - DNA, 15 bp, Homo sapiens
agtaatttgagtacc

SEQ ID NO: 2142358 - DNA, 15 bp, Homo sapiens
gtaatttgagtaccg

SEQ ID NO: 2142359 - DNA, 15 bp, Homo sapiens
taatttgagtaccgc

SEQ ID NO: 2142360 - DNA, 15 bp, Homo sapiens
aatttgagtaccgct

SEQ ID NO: 2142361 - DNA, 15 bp, Homo sapiens
atttgagtaccgctt

SEQ ID NO: 2142362 - DNA, 15 bp, Homo sapiens
tttgagtaccgcttt

SEQ ID NO: 2142363 - DNA, 15 bp, Homo sapiens
ttgagtaccgcttta

SEQ ID NO: 2142364 - DNA, 15 bp, Homo sapiens
tgagtaccgctttat

SEQ ID NO: 2142365 - DNA, 15 bp, Homo sapiens
gagtaccgctttatt

SEQ ID NO: 2142366 - DNA, 15 bp, Homo sapiens
agtaccgctttattc

SEQ ID NO: 2142367 - DNA, 15 bp, Homo sapiens
gtaccgctttattct

SEQ ID NO: 2142368 - DNA, 15 bp, Homo sapiens
taccgctttattctg

SEQ ID NO: 2142369 - DNA, 15 bp, Homo sapiens
accgctttattctgt

SEQ ID NO: 2142370 - DNA, 15 bp, Homo sapiens
ccgctttattctgtg

SEQ ID NO: 2142371 - DNA, 15 bp, Homo sapiens
cgctttattctgtgg

SEQ ID NO: 2142372 - DNA, 15 bp, Homo sapiens
gctttattctgtggt

SEQ ID NO: 2142373 - DNA, 15 bp, Homo sapiens
ctttattctgtggta

SEQ ID NO: 2142374 - DNA, 15 bp, Homo sapiens
tttattctgtggtag

SEQ ID NO: 2142375 - DNA, 15 bp, Homo sapiens
ttattctgtggtaga

SEQ ID NO: 2142376 - DNA, 15 bp, Homo sapiens
tattctgtggtagag

SEQ ID NO: 2142377 - DNA, 15 bp, Homo sapiens
attctgtggtagagt

SEQ ID NO: 2142378 - DNA, 15 bp, Homo sapiens
ttctgtggtagagtt

SEQ ID NO: 2142379 - DNA, 15 bp, Homo sapiens
tctgtggtagagtta

SEQ ID NO: 2142380 - DNA, 15 bp, Homo sapiens
ctgtggtagagttac

SEQ ID NO: 2142381 - DNA, 15 bp, Homo sapiens
tgtggtagagttacc

SEQ ID NO: 2142382 - DNA, 15 bp, Homo sapiens
gtggtagagttacct

SEQ ID NO: 2142383 - DNA, 15 bp, Homo sapiens
tggtagagttaccta

SEQ ID NO: 2142384 - DNA, 15 bp, Homo sapiens
ggtagagttacctag

SEQ ID NO: 2142385 - DNA, 15 bp, Homo sapiens
gtagagttacctaga

SEQ ID NO: 2142386 - DNA, 15 bp, Homo sapiens
tagagttacctagaa

SEQ ID NO: 2142387 - DNA, 15 bp, Homo sapiens
agagttacctagaaa

SEQ ID NO: 2142388 - DNA, 15 bp, Homo sapiens
gagttacctagaaaa

SEQ ID NO: 2142389 - DNA, 15 bp, Homo sapiens
agttacctagaaaac

SEQ ID NO: 2142390 - DNA, 15 bp, Homo sapiens
gttacctagaaaaca

SEQ ID NO: 2142391 - DNA, 15 bp, Homo sapiens
ttacctagaaaacat

SEQ ID NO: 2142392 - DNA, 15 bp, Homo sapiens
tacctagaaaacata

SEQ ID NO: 2142393 - DNA, 15 bp, Homo sapiens
acctagaaaacatat

SEQ ID NO: 2142394 - DNA, 15 bp, Homo sapiens
cctagaaaacatatg

SEQ ID NO: 2142395 - DNA, 15 bp, Homo sapiens
ctagaaaacatatgg

SEQ ID NO: 2142396 - DNA, 15 bp, Homo sapiens
tagaaaacatatggg

SEQ ID NO: 2142397 - DNA, 15 bp, Homo sapiens
agaaaacatatgggt

SEQ ID NO: 2142398 - DNA, 15 bp, Homo sapiens
gaaaacatatgggtt

SEQ ID NO: 2142399 - DNA, 15 bp, Homo sapiens
aaaacatatgggttg

SEQ ID NO: 2142400 - DNA, 15 bp, Homo sapiens
aaacatatgggttga

SEQ ID NO: 2142401 - DNA, 15 bp, Homo sapiens
aacatatgggttgag

SEQ ID NO: 2142402 - DNA, 15 bp, Homo sapiens
acatatgggttgagg

SEQ ID NO: 2142403 - DNA, 15 bp, Homo sapiens
catatgggttgaggg

SEQ ID NO: 2142404 - DNA, 15 bp, Homo sapiens
atatgggttgagggc

SEQ ID NO: 2142405 - DNA, 15 bp, Homo sapiens
tatgggttgagggca

SEQ ID NO: 2142406 - DNA, 15 bp, Homo sapiens
atgggttgagggcat

SEQ ID NO: 2142407 - DNA, 15 bp, Homo sapiens
tgggttgagggcatg

SEQ ID NO: 2142408 - DNA, 15 bp, Homo sapiens
gggttgagggcatgt

SEQ ID NO: 2142409 - DNA, 15 bp, Homo sapiens
ggttgagggcatgta

SEQ ID NO: 2142410 - DNA, 15 bp, Homo sapiens
gttgagggcatgtaa

SEQ ID NO: 2142411 - DNA, 15 bp, Homo sapiens
ttgagggcatgtaat

SEQ ID NO: 2142412 - DNA, 15 bp, Homo sapiens
tgagggcatgtaatc

SEQ ID NO: 2142413 - DNA, 15 bp, Homo sapiens
gagggcatgtaatca

SEQ ID NO: 2142414 - DNA, 15 bp, Homo sapiens
agggcatgtaatcat

SEQ ID NO: 2142415 - DNA, 15 bp, Homo sapiens
gggcatgtaatcatg

SEQ ID NO: 2142416 - DNA, 15 bp, Homo sapiens
ggcatgtaatcatgt

SEQ ID NO: 2142417 - DNA, 15 bp, Homo sapiens
gcatgtaatcatgtc

SEQ ID NO: 2142418 - DNA, 15 bp, Homo sapiens
catgtaatcatgtcc

SEQ ID NO: 2142419 - DNA, 15 bp, Homo sapiens
atgtaatcatgtccc

SEQ ID NO: 2142420 - DNA, 15 bp, Homo sapiens
tgtaatcatgtcccc

SEQ ID NO: 2142421 - DNA, 15 bp, Homo sapiens
gtaatcatgtccccc

SEQ ID NO: 2142422 - DNA, 15 bp, Homo sapiens
taatcatgtccccca

SEQ ID NO: 2142423 - DNA, 15 bp, Homo sapiens
aatcatgtcccccat

SEQ ID NO: 2142424 - DNA, 15 bp, Homo sapiens
atcatgtcccccata

SEQ ID NO: 2142425 - DNA, 15 bp, Homo sapiens
tcatgtcccccatat

SEQ ID NO: 2142426 - DNA, 15 bp, Homo sapiens
catgtcccccatatc

SEQ ID NO: 2142427 - DNA, 15 bp, Homo sapiens
atgtcccccatatct

SEQ ID NO: 2142428 - DNA, 15 bp, Homo sapiens
tgtcccccatatctg

SEQ ID NO: 2142429 - DNA, 15 bp, Homo sapiens
gtcccccatatctgt

SEQ ID NO: 2142430 - DNA, 15 bp, Homo sapiens
tcccccatatctgtg

SEQ ID NO: 2142431 - DNA, 15 bp, Homo sapiens
cccccatatctgtga

SEQ ID NO: 2142432 - DNA, 15 bp, Homo sapiens
ccccatatctgtgaa

SEQ ID NO: 2142433 - DNA, 15 bp, Homo sapiens
cccatatctgtgaaa

SEQ ID NO: 2142434 - DNA, 15 bp, Homo sapiens
ccatatctgtgaaaa

SEQ ID NO: 2142435 - DNA, 15 bp, Homo sapiens
catatctgtgaaaat

SEQ ID NO: 2142436 - DNA, 15 bp, Homo sapiens
atatctgtgaaaatg

SEQ ID NO: 2142437 - DNA, 15 bp, Homo sapiens
tatctgtgaaaatgg

SEQ ID NO: 2142438 - DNA, 15 bp, Homo sapiens
atctgtgaaaatgga

SEQ ID NO: 2142439 - DNA, 15 bp, Homo sapiens
tctgtgaaaatggac

SEQ ID NO: 2142440 - DNA, 15 bp, Homo sapiens
ctgtgaaaatggaca

SEQ ID NO: 2142441 - DNA, 15 bp, Homo sapiens
tgtgaaaatggacag

SEQ ID NO: 2142442 - DNA, 15 bp, Homo sapiens
gtgaaaatggacagt

SEQ ID NO: 2142443 - DNA, 15 bp, Homo sapiens
tgaaaatggacagta

SEQ ID NO: 2142444 - DNA, 15 bp, Homo sapiens
gaaaatggacagtaa

SEQ ID NO: 2142445 - DNA, 15 bp, Homo sapiens
aaaatggacagtaag

SEQ ID NO: 2142446 - DNA, 15 bp, Homo sapiens
aaatggacagtaaga

SEQ ID NO: 2142447 - DNA, 15 bp, Homo sapiens
aatggacagtaagaa

SEQ ID NO: 2142448 - DNA, 15 bp, Homo sapiens
atggacagtaagaag

SEQ ID NO: 2142449 - DNA, 15 bp, Homo sapiens
tggacagtaagaagt

SEQ ID NO: 2142450 - DNA, 15 bp, Homo sapiens
ggacagtaagaagtg

SEQ ID NO: 2142451 - DNA, 15 bp, Homo sapiens
gacagtaagaagtgg

SEQ ID NO: 2142452 - DNA, 15 bp, Homo sapiens
acagtaagaagtggt

SEQ ID NO: 2142453 - DNA, 15 bp, Homo sapiens
cagtaagaagtggta

SEQ ID NO: 2142454 - DNA, 15 bp, Homo sapiens
agtaagaagtggtaa

SEQ ID NO: 2142455 - DNA, 15 bp, Homo sapiens
gtaagaagtggtaaa

SEQ ID NO: 2142456 - DNA, 15 bp, Homo sapiens
taagaagtggtaaac

SEQ ID NO: 2142457 - DNA, 15 bp, Homo sapiens
aagaagtggtaaaca

SEQ ID NO: 2142458 - DNA, 15 bp, Homo sapiens
agaagtggtaaacat

SEQ ID NO: 2142459 - DNA, 15 bp, Homo sapiens
gaagtggtaaacatt

SEQ ID NO: 2142460 - DNA, 15 bp, Homo sapiens
aagtggtaaacattg

SEQ ID NO: 2142461 - DNA, 15 bp, Homo sapiens
agtggtaaacattgt

SEQ ID NO: 2142462 - DNA, 15 bp, Homo sapiens
gtggtaaacattgtt

SEQ ID NO: 2142463 - DNA, 15 bp, Homo sapiens
tggtaaacattgtta

SEQ ID NO: 2142464 - DNA, 15 bp, Homo sapiens
ggtaaacattgttag

SEQ ID NO: 2142465 - DNA, 15 bp, Homo sapiens
gtaaacattgttagg

SEQ ID NO: 2142466 - DNA, 15 bp, Homo sapiens
taaacattgttaggg

SEQ ID NO: 2142467 - DNA, 15 bp, Homo sapiens
aaacattgttagggg

SEQ ID NO: 2142468 - DNA, 15 bp, Homo sapiens
aacattgttaggggc

SEQ ID NO: 2142469 - DNA, 15 bp, Homo sapiens
acattgttaggggca

SEQ ID NO: 2142470 - DNA, 15 bp, Homo sapiens
cattgttaggggcag

SEQ ID NO: 2142471 - DNA, 15 bp, Homo sapiens
attgttaggggcagg

SEQ ID NO: 2142472 - DNA, 15 bp, Homo sapiens
ttgttaggggcaggg

SEQ ID NO: 2142473 - DNA, 15 bp, Homo sapiens
tgttaggggcagggt

SEQ ID NO: 2142474 - DNA, 15 bp, Homo sapiens
gttaggggcagggtt

SEQ ID NO: 2142475 - DNA, 15 bp, Homo sapiens
ttaggggcagggttc

SEQ ID NO: 2142476 - DNA, 15 bp, Homo sapiens
taggggcagggttcc

SEQ ID NO: 2142477 - DNA, 15 bp, Homo sapiens
aggggcagggttcca

SEQ ID NO: 2142478 - DNA, 15 bp, Homo sapiens
ggggcagggttccac

SEQ ID NO: 2142479 - DNA, 15 bp, Homo sapiens
gggcagggttccact

SEQ ID NO: 2142480 - DNA, 15 bp, Homo sapiens
ggcagggttccacta

SEQ ID NO: 2142481 - DNA, 15 bp, Homo sapiens
gcagggttccactag

SEQ ID NO: 2142482 - DNA, 15 bp, Homo sapiens
cagggttccactagg

SEQ ID NO: 2142483 - DNA, 15 bp, Homo sapiens
agggttccactagga

SEQ ID NO: 2142484 - DNA, 15 bp, Homo sapiens
gggttccactaggaa

SEQ ID NO: 2142485 - DNA, 15 bp, Homo sapiens
ggttccactaggaaa

SEQ ID NO: 2142486 - DNA, 15 bp, Homo sapiens
gttccactaggaaat

SEQ ID NO: 2142487 - DNA, 15 bp, Homo sapiens
ttccactaggaaatt

SEQ ID NO: 2142488 - DNA, 15 bp, Homo sapiens
tccactaggaaattt

SEQ ID NO: 2142489 - DNA, 15 bp, Homo sapiens
ccactaggaaatttg

SEQ ID NO: 2142490 - DNA, 15 bp, Homo sapiens
cactaggaaatttgg

SEQ ID NO: 2142491 - DNA, 15 bp, Homo sapiens
actaggaaatttgga

SEQ ID NO: 2142492 - DNA, 15 bp, Homo sapiens
ctaggaaatttggat

SEQ ID NO: 2142493 - DNA, 15 bp, Homo sapiens
taggaaatttggata

SEQ ID NO: 2142494 - DNA, 15 bp, Homo sapiens
aggaaatttggataa

SEQ ID NO: 2142495 - DNA, 15 bp, Homo sapiens
ggaaatttggataaa

SEQ ID NO: 2142496 - DNA, 15 bp, Homo sapiens
gaaatttggataaag

SEQ ID NO: 2142497 - DNA, 15 bp, Homo sapiens
aaatttggataaaga

SEQ ID NO: 2142498 - DNA, 15 bp, Homo sapiens
aatttggataaagag

SEQ ID NO: 2142499 - DNA, 15 bp, Homo sapiens
atttggataaagaga

SEQ ID NO: 2142500 - DNA, 15 bp, Homo sapiens
tttggataaagagaa

SEQ ID NO: 2142501 - DNA, 15 bp, Homo sapiens
ttggataaagagaaa

SEQ ID NO: 2142502 - DNA, 15 bp, Homo sapiens
tggataaagagaaat

SEQ ID NO: 2142503 - DNA, 15 bp, Homo sapiens
ggataaagagaaatg

SEQ ID NO: 2142504 - DNA, 15 bp, Homo sapiens
gataaagagaaatgt

SEQ ID NO: 2142505 - DNA, 15 bp, Homo sapiens
ataaagagaaatgta

SEQ ID NO: 2142506 - DNA, 15 bp, Homo sapiens
taaagagaaatgtaa

SEQ ID NO: 2142507 - DNA, 15 bp, Homo sapiens
aaagagaaatgtaaa

SEQ ID NO: 2142508 - DNA, 15 bp, Homo sapiens
aagagaaatgtaaat

SEQ ID NO: 2142509 - DNA, 15 bp, Homo sapiens
agagaaatgtaaatt

SEQ ID NO: 2142510 - DNA, 15 bp, Homo sapiens
gagaaatgtaaattt

SEQ ID NO: 2142511 - DNA, 15 bp, Homo sapiens
agaaatgtaaatttc

SEQ ID NO: 2142512 - DNA, 15 bp, Homo sapiens
gaaatgtaaatttca

SEQ ID NO: 2142513 - DNA, 15 bp, Homo sapiens
aaatgtaaatttcat

SEQ ID NO: 2142514 - DNA, 15 bp, Homo sapiens
aatgtaaatttcata

SEQ ID NO: 2142515 - DNA, 15 bp, Homo sapiens
atgtaaatttcatat

SEQ ID NO: 2142516 - DNA, 15 bp, Homo sapiens
tgtaaatttcatatt

SEQ ID NO: 2142517 - DNA, 15 bp, Homo sapiens
gtaaatttcatattt

SEQ ID NO: 2142518 - DNA, 15 bp, Homo sapiens
taaatttcatatttt

SEQ ID NO: 2142519 - DNA, 15 bp, Homo sapiens
aaatttcatattttc

SEQ ID NO: 2142520 - DNA, 15 bp, Homo sapiens
aatttcatattttct

SEQ ID NO: 2142521 - DNA, 15 bp, Homo sapiens
atttcatattttcta

SEQ ID NO: 2142522 - DNA, 15 bp, Homo sapiens
tttcatattttctac

SEQ ID NO: 2142523 - DNA, 15 bp, Homo sapiens
ttcatattttctact

SEQ ID NO: 2142524 - DNA, 15 bp, Homo sapiens
tcatattttctactc

SEQ ID NO: 2142525 - DNA, 15 bp, Homo sapiens
catattttctactca

SEQ ID NO: 2142526 - DNA, 15 bp, Homo sapiens
atattttctactcat

SEQ ID NO: 2142527 - DNA, 15 bp, Homo sapiens
tattttctactcata

SEQ ID NO: 2142528 - DNA, 15 bp, Homo sapiens
attttctactcatag

SEQ ID NO: 2142529 - DNA, 15 bp, Homo sapiens
ttttctactcatagg

SEQ ID NO: 2142530 - DNA, 15 bp, Homo sapiens
tttctactcataggc

SEQ ID NO: 2142531 - DNA, 15 bp, Homo sapiens
ttctactcataggcc

SEQ ID NO: 2142532 - DNA, 15 bp, Homo sapiens
tctactcataggcca

SEQ ID NO: 2142533 - DNA, 15 bp, Homo sapiens
ctactcataggccat

SEQ ID NO: 2142534 - DNA, 15 bp, Homo sapiens
tactcataggccatt

SEQ ID NO: 2142535 - DNA, 15 bp, Homo sapiens
actcataggccattt

SEQ ID NO: 2142536 - DNA, 15 bp, Homo sapiens
ctcataggccatttt

SEQ ID NO: 2142537 - DNA, 15 bp, Homo sapiens
tcataggccatttta

SEQ ID NO: 2142538 - DNA, 15 bp, Homo sapiens
cataggccattttac

SEQ ID NO: 2142539 - DNA, 15 bp, Homo sapiens
ataggccattttacc

SEQ ID NO: 2142540 - DNA, 15 bp, Homo sapiens
taggccattttacca

SEQ ID NO: 2142541 - DNA, 15 bp, Homo sapiens
aggccattttaccat

SEQ ID NO: 2142542 - DNA, 15 bp, Homo sapiens
ggccattttaccatt

SEQ ID NO: 2142543 - DNA, 15 bp, Homo sapiens
gccattttaccatta

SEQ ID NO: 2142544 - DNA, 15 bp, Homo sapiens
ccattttaccattag

SEQ ID NO: 2142545 - DNA, 15 bp, Homo sapiens
cattttaccattagc

SEQ ID NO: 2142546 - DNA, 15 bp, Homo sapiens
attttaccattagca

SEQ ID NO: 2142547 - DNA, 15 bp, Homo sapiens
ttttaccattagcag

SEQ ID NO: 2142548 - DNA, 15 bp, Homo sapiens
tttaccattagcagt

SEQ ID NO: 2142549 - DNA, 15 bp, Homo sapiens
ttaccattagcagta

SEQ ID NO: 2142550 - DNA, 15 bp, Homo sapiens
taccattagcagtaa

SEQ ID NO: 2142551 - DNA, 15 bp, Homo sapiens
accattagcagtaat

SEQ ID NO: 2142552 - DNA, 15 bp, Homo sapiens
ccattagcagtaata

SEQ ID NO: 2142553 - DNA, 15 bp, Homo sapiens
cattagcagtaatat

SEQ ID NO: 2142554 - DNA, 15 bp, Homo sapiens
attagcagtaatatc

SEQ ID NO: 2142555 - DNA, 15 bp, Homo sapiens
ttagcagtaatatct

SEQ ID NO: 2142556 - DNA, 15 bp, Homo sapiens
tagcagtaatatcta

SEQ ID NO: 2142557 - DNA, 15 bp, Homo sapiens
agcagtaatatctaa

SEQ ID NO: 2142558 - DNA, 15 bp, Homo sapiens
gcagtaatatctaaa

SEQ ID NO: 2142559 - DNA, 15 bp, Homo sapiens
cagtaatatctaaat

SEQ ID NO: 2142560 - DNA, 15 bp, Homo sapiens
agtaatatctaaata

SEQ ID NO: 2142561 - DNA, 15 bp, Homo sapiens
gtaatatctaaatac

SEQ ID NO: 2142562 - DNA, 15 bp, Homo sapiens
taatatctaaatact

SEQ ID NO: 2142563 - DNA, 15 bp, Homo sapiens
aatatctaaatactg

SEQ ID NO: 2142564 - DNA, 15 bp, Homo sapiens
atatctaaatactga

SEQ ID NO: 2142565 - DNA, 15 bp, Homo sapiens
tatctaaatactgaa

SEQ ID NO: 2142566 - DNA, 15 bp, Homo sapiens
atctaaatactgaaa

SEQ ID NO: 2142567 - DNA, 15 bp, Homo sapiens
tctaaatactgaaaa

SEQ ID NO: 2142568 - DNA, 15 bp, Homo sapiens
ctaaatactgaaaac

SEQ ID NO: 2142569 - DNA, 15 bp, Homo sapiens
taaatactgaaaaca

SEQ ID NO: 2142570 - DNA, 15 bp, Homo sapiens
aaatactgaaaacag

SEQ ID NO: 2142571 - DNA, 15 bp, Homo sapiens
aatactgaaaacagt

SEQ ID NO: 2142572 - DNA, 15 bp, Homo sapiens
atactgaaaacagta

SEQ ID NO: 2142573 - DNA, 15 bp, Homo sapiens
tactgaaaacagtaa

SEQ ID NO: 2142574 - DNA, 15 bp, Homo sapiens
actgaaaacagtaat

SEQ ID NO: 2142575 - DNA, 15 bp, Homo sapiens
ctgaaaacagtaatt

SEQ ID NO: 2142576 - DNA, 15 bp, Homo sapiens
tgaaaacagtaatta

SEQ ID NO: 2142577 - DNA, 15 bp, Homo sapiens
gaaaacagtaattat

SEQ ID NO: 2142578 - DNA, 15 bp, Homo sapiens
aaaacagtaattata

SEQ ID NO: 2142579 - DNA, 15 bp, Homo sapiens
aaacagtaattatag

SEQ ID NO: 2142580 - DNA, 15 bp, Homo sapiens
aacagtaattatagg

SEQ ID NO: 2142581 - DNA, 15 bp, Homo sapiens
acagtaattatagga

SEQ ID NO: 2142582 - DNA, 15 bp, Homo sapiens
cagtaattataggaa

SEQ ID NO: 2142583 - DNA, 15 bp, Homo sapiens
agtaattataggaaa

SEQ ID NO: 2142584 - DNA, 15 bp, Homo sapiens
gtaattataggaaat

SEQ ID NO: 2142585 - DNA, 15 bp, Homo sapiens
taattataggaaatc

SEQ ID NO: 2142586 - DNA, 15 bp, Homo sapiens
aattataggaaatct

SEQ ID NO: 2142587 - DNA, 15 bp, Homo sapiens
attataggaaatctt

SEQ ID NO: 2142588 - DNA, 15 bp, Homo sapiens
ttataggaaatcttg

SEQ ID NO: 2142589 - DNA, 15 bp, Homo sapiens
tataggaaatcttgg

SEQ ID NO: 2142590 - DNA, 15 bp, Homo sapiens
ataggaaatcttggg

SEQ ID NO: 2142591 - DNA, 15 bp, Homo sapiens
taggaaatcttggga

SEQ ID NO: 2142592 - DNA, 15 bp, Homo sapiens
aggaaatcttgggaa

SEQ ID NO: 2142593 - DNA, 15 bp, Homo sapiens
ggaaatcttgggaac

SEQ ID NO: 2142594 - DNA, 15 bp, Homo sapiens
gaaatcttgggaact

SEQ ID NO: 2142595 - DNA, 15 bp, Homo sapiens
aaatcttgggaacta

SEQ ID NO: 2142596 - DNA, 15 bp, Homo sapiens
aatcttgggaactaa

SEQ ID NO: 2142597 - DNA, 15 bp, Homo sapiens
atcttgggaactaaa

SEQ ID NO: 2142598 - DNA, 15 bp, Homo sapiens
tcttgggaactaaaa

SEQ ID NO: 2142599 - DNA, 15 bp, Homo sapiens
cttgggaactaaaag

SEQ ID NO: 2142600 - DNA, 15 bp, Homo sapiens
ttgggaactaaaagt

SEQ ID NO: 2142601 - DNA, 15 bp, Homo sapiens
tgggaactaaaagtc

SEQ ID NO: 2142602 - DNA, 15 bp, Homo sapiens
gggaactaaaagtca

SEQ ID NO: 2142603 - DNA, 15 bp, Homo sapiens
ggaactaaaagtcaa

SEQ ID NO: 2142604 - DNA, 15 bp, Homo sapiens
gaactaaaagtcaac

SEQ ID NO: 2142605 - DNA, 15 bp, Homo sapiens
aactaaaagtcaact

SEQ ID NO: 2142606 - DNA, 15 bp, Homo sapiens
actaaaagtcaactt

SEQ ID NO: 2142607 - DNA, 15 bp, Homo sapiens
ctaaaagtcaactta

SEQ ID NO: 2142608 - DNA, 15 bp, Homo sapiens
taaaagtcaacttaa

SEQ ID NO: 2142609 - DNA, 15 bp, Homo sapiens
aaaagtcaacttaat

SEQ ID NO: 2142610 - DNA, 15 bp, Homo sapiens
aaagtcaacttaatg

SEQ ID NO: 2142611 - DNA, 15 bp, Homo sapiens
aagtcaacttaatga

SEQ ID NO: 2142612 - DNA, 15 bp, Homo sapiens
agtcaacttaatgat

SEQ ID NO: 2142613 - DNA, 15 bp, Homo sapiens
gtcaacttaatgatg

SEQ ID NO: 2142614 - DNA, 15 bp, Homo sapiens
tcaacttaatgatga

SEQ ID NO: 2142615 - DNA, 15 bp, Homo sapiens
caacttaatgatgat

SEQ ID NO: 2142616 - DNA, 15 bp, Homo sapiens
aacttaatgatgatt

SEQ ID NO: 2142617 - DNA, 15 bp, Homo sapiens
acttaatgatgatta

SEQ ID NO: 2142618 - DNA, 15 bp, Homo sapiens
cttaatgatgattat

SEQ ID NO: 2142619 - DNA, 15 bp, Homo sapiens
ttaatgatgattata

SEQ ID NO: 2142620 - DNA, 15 bp, Homo sapiens
taatgatgattataa

SEQ ID NO: 2142621 - DNA, 15 bp, Homo sapiens
aatgatgattataat

SEQ ID NO: 2142622 - DNA, 15 bp, Homo sapiens
atgatgattataatt

SEQ ID NO: 2142623 - DNA, 15 bp, Homo sapiens
tgatgattataattt

SEQ ID NO: 2142624 - DNA, 15 bp, Homo sapiens
gatgattataatttt

SEQ ID NO: 2142625 - DNA, 15 bp, Homo sapiens
atgattataattttc

SEQ ID NO: 2142626 - DNA, 15 bp, Homo sapiens
tgattataattttcc

SEQ ID NO: 2142627 - DNA, 15 bp, Homo sapiens
gattataattttcct

SEQ ID NO: 2142628 - DNA, 15 bp, Homo sapiens
attataattttccta

SEQ ID NO: 2142629 - DNA, 15 bp, Homo sapiens
ttataattttcctag

SEQ ID NO: 2142630 - DNA, 15 bp, Homo sapiens
tataattttcctaga

SEQ ID NO: 2142631 - DNA, 15 bp, Homo sapiens
ataattttcctagac

SEQ ID NO: 2142632 - DNA, 15 bp, Homo sapiens
taattttcctagact

SEQ ID NO: 2142633 - DNA, 15 bp, Homo sapiens
aattttcctagactt

SEQ ID NO: 2142634 - DNA, 15 bp, Homo sapiens
attttcctagactta

SEQ ID NO: 2142635 - DNA, 15 bp, Homo sapiens
ttttcctagacttaa

SEQ ID NO: 2142636 - DNA, 15 bp, Homo sapiens
tttcctagacttaac

SEQ ID NO: 2142637 - DNA, 15 bp, Homo sapiens
ttcctagacttaaca

SEQ ID NO: 2142638 - DNA, 15 bp, Homo sapiens
tcctagacttaacac

SEQ ID NO: 2142639 - DNA, 15 bp, Homo sapiens
cctagacttaacacc

SEQ ID NO: 2142640 - DNA, 15 bp, Homo sapiens
ctagacttaacaccc

SEQ ID NO: 2142641 - DNA, 15 bp, Homo sapiens
tagacttaacaccca

SEQ ID NO: 2142642 - DNA, 15 bp, Homo sapiens
agacttaacacccat

SEQ ID NO: 2142643 - DNA, 15 bp, Homo sapiens
gacttaacacccatt

SEQ ID NO: 2142644 - DNA, 15 bp, Homo sapiens
acttaacacccattc

SEQ ID NO: 2142645 - DNA, 15 bp, Homo sapiens
cttaacacccattct

SEQ ID NO: 2142646 - DNA, 15 bp, Homo sapiens
ttaacacccattctt

SEQ ID NO: 2142647 - DNA, 15 bp, Homo sapiens
taacacccattcttt

SEQ ID NO: 2142648 - DNA, 15 bp, Homo sapiens
aacacccattctttt

SEQ ID NO: 2142649 - DNA, 15 bp, Homo sapiens
acacccattcttttg

SEQ ID NO: 2142650 - DNA, 15 bp, Homo sapiens
cacccattcttttgg

SEQ ID NO: 2142651 - DNA, 15 bp, Homo sapiens
acccattcttttggt

SEQ ID NO: 2142652 - DNA, 15 bp, Homo sapiens
cccattcttttggta

SEQ ID NO: 2142653 - DNA, 15 bp, Homo sapiens
ccattcttttggtat

SEQ ID NO: 2142654 - DNA, 15 bp, Homo sapiens
cattcttttggtata

SEQ ID NO: 2142655 - DNA, 15 bp, Homo sapiens
attcttttggtatac

SEQ ID NO: 2142656 - DNA, 15 bp, Homo sapiens
ttcttttggtatact

SEQ ID NO: 2142657 - DNA, 15 bp, Homo sapiens
tcttttggtatactg

SEQ ID NO: 2142658 - DNA, 15 bp, Homo sapiens
cttttggtatactga

SEQ ID NO: 2142659 - DNA, 15 bp, Homo sapiens
ttttggtatactgac

SEQ ID NO: 2142660 - DNA, 15 bp, Homo sapiens
tttggtatactgaca

SEQ ID NO: 2142661 - DNA, 15 bp, Homo sapiens
ttggtatactgacag

SEQ ID NO: 2142662 - DNA, 15 bp, Homo sapiens
tggtatactgacagt

SEQ ID NO: 2142663 - DNA, 15 bp, Homo sapiens
ggtatactgacagtc

SEQ ID NO: 2142664 - DNA, 15 bp, Homo sapiens
gtatactgacagtcc

SEQ ID NO: 2142665 - DNA, 15 bp, Homo sapiens
tatactgacagtccc

SEQ ID NO: 2142666 - DNA, 15 bp, Homo sapiens
atactgacagtccct

SEQ ID NO: 2142667 - DNA, 15 bp, Homo sapiens
tactgacagtcccta

SEQ ID NO: 2142668 - DNA, 15 bp, Homo sapiens
actgacagtccctaa

SEQ ID NO: 2142669 - DNA, 15 bp, Homo sapiens
ctgacagtccctaat

SEQ ID NO: 2142670 - DNA, 15 bp, Homo sapiens
tgacagtccctaatg

SEQ ID NO: 2142671 - DNA, 15 bp, Homo sapiens
gacagtccctaatga

SEQ ID NO: 2142672 - DNA, 15 bp, Homo sapiens
acagtccctaatgag

SEQ ID NO: 2142673 - DNA, 15 bp, Homo sapiens
cagtccctaatgagg

SEQ ID NO: 2142674 - DNA, 15 bp, Homo sapiens
agtccctaatgagga

SEQ ID NO: 2142675 - DNA, 15 bp, Homo sapiens
gtccctaatgaggat

SEQ ID NO: 2142676 - DNA, 15 bp, Homo sapiens
tccctaatgaggata

SEQ ID NO: 2142677 - DNA, 15 bp, Homo sapiens
ccctaatgaggatac

SEQ ID NO: 2142678 - DNA, 15 bp, Homo sapiens
cctaatgaggataca

SEQ ID NO: 2142679 - DNA, 15 bp, Homo sapiens
ctaatgaggatacaa

SEQ ID NO: 2142680 - DNA, 15 bp, Homo sapiens
taatgaggatacaag

SEQ ID NO: 2142681 - DNA, 15 bp, Homo sapiens
aatgaggatacaagc

SEQ ID NO: 2142682 - DNA, 15 bp, Homo sapiens
atgaggatacaagcc

SEQ ID NO: 2142683 - DNA, 15 bp, Homo sapiens
tgaggatacaagcca

SEQ ID NO: 2142684 - DNA, 15 bp, Homo sapiens
gaggatacaagccat

SEQ ID NO: 2142685 - DNA, 15 bp, Homo sapiens
aggatacaagccatt

SEQ ID NO: 2142686 - DNA, 15 bp, Homo sapiens
ggatacaagccattg

SEQ ID NO: 2142687 - DNA, 15 bp, Homo sapiens
gatacaagccattgg

SEQ ID NO: 2142688 - DNA, 15 bp, Homo sapiens
atacaagccattggt

SEQ ID NO: 2142689 - DNA, 15 bp, Homo sapiens
tacaagccattggtc

SEQ ID NO: 2142690 - DNA, 15 bp, Homo sapiens
acaagccattggtct

SEQ ID NO: 2142691 - DNA, 15 bp, Homo sapiens
caagccattggtcta

SEQ ID NO: 2142692 - DNA, 15 bp, Homo sapiens
aagccattggtctaa

SEQ ID NO: 2142693 - DNA, 15 bp, Homo sapiens
agccattggtctaaa

SEQ ID NO: 2142694 - DNA, 15 bp, Homo sapiens
gccattggtctaaaa

SEQ ID NO: 2142695 - DNA, 15 bp, Homo sapiens
ccattggtctaaaat

SEQ ID NO: 2142696 - DNA, 15 bp, Homo sapiens
cattggtctaaaata

SEQ ID NO: 2142697 - DNA, 15 bp, Homo sapiens
attggtctaaaatag

SEQ ID NO: 2142698 - DNA, 15 bp, Homo sapiens
ttggtctaaaatagg

SEQ ID NO: 2142699 - DNA, 15 bp, Homo sapiens
tggtctaaaataggc

SEQ ID NO: 2142700 - DNA, 15 bp, Homo sapiens
ggtctaaaataggca

SEQ ID NO: 2142701 - DNA, 15 bp, Homo sapiens
gtctaaaataggcat

SEQ ID NO: 2142702 - DNA, 15 bp, Homo sapiens
tctaaaataggcatt

SEQ ID NO: 2142703 - DNA, 15 bp, Homo sapiens
ctaaaataggcattg

SEQ ID NO: 2142704 - DNA, 15 bp, Homo sapiens
taaaataggcattgc

SEQ ID NO: 2142705 - DNA, 15 bp, Homo sapiens
aaaataggcattgct

SEQ ID NO: 2142706 - DNA, 15 bp, Homo sapiens
aaataggcattgctt

SEQ ID NO: 2142707 - DNA, 15 bp, Homo sapiens
aataggcattgcttg

SEQ ID NO: 2142708 - DNA, 15 bp, Homo sapiens
ataggcattgcttgt

SEQ ID NO: 2142709 - DNA, 15 bp, Homo sapiens
taggcattgcttgtc

SEQ ID NO: 2142710 - DNA, 15 bp, Homo sapiens
aggcattgcttgtca

SEQ ID NO: 2142711 - DNA, 15 bp, Homo sapiens
ggcattgcttgtcac

SEQ ID NO: 2142712 - DNA, 15 bp, Homo sapiens
gcattgcttgtcaca

SEQ ID NO: 2142713 - DNA, 15 bp, Homo sapiens
cattgcttgtcacaa

SEQ ID NO: 2142714 - DNA, 15 bp, Homo sapiens
attgcttgtcacaac

SEQ ID NO: 2142715 - DNA, 15 bp, Homo sapiens
ttgcttgtcacaacc

SEQ ID NO: 2142716 - DNA, 15 bp, Homo sapiens
tgcttgtcacaacca

SEQ ID NO: 2142717 - DNA, 15 bp, Homo sapiens
gcttgtcacaaccaa

SEQ ID NO: 2142718 - DNA, 15 bp, Homo sapiens
cttgtcacaaccaaa

SEQ ID NO: 2142719 - DNA, 15 bp, Homo sapiens
ttgtcacaaccaaat

SEQ ID NO: 2142720 - DNA, 15 bp, Homo sapiens
tgtcacaaccaaatt

SEQ ID NO: 2142721 - DNA, 15 bp, Homo sapiens
gtcacaaccaaattc

SEQ ID NO: 2142722 - DNA, 15 bp, Homo sapiens
tcacaaccaaattcc

SEQ ID NO: 2142723 - DNA, 15 bp, Homo sapiens
cacaaccaaattcct

SEQ ID NO: 2142724 - DNA, 15 bp, Homo sapiens
acaaccaaattcctc

SEQ ID NO: 2142725 - DNA, 15 bp, Homo sapiens
caaccaaattcctca

SEQ ID NO: 2142726 - DNA, 15 bp, Homo sapiens
aaccaaattcctcat

SEQ ID NO: 2142727 - DNA, 15 bp, Homo sapiens
accaaattcctcatt

SEQ ID NO: 2142728 - DNA, 15 bp, Homo sapiens
ccaaattcctcattt

SEQ ID NO: 2142729 - DNA, 15 bp, Homo sapiens
caaattcctcattta

SEQ ID NO: 2142730 - DNA, 15 bp, Homo sapiens
aaattcctcatttat

SEQ ID NO: 2142731 - DNA, 15 bp, Homo sapiens
aattcctcatttatg

SEQ ID NO: 2142732 - DNA, 15 bp, Homo sapiens
attcctcatttatgt

SEQ ID NO: 2142733 - DNA, 15 bp, Homo sapiens
ttcctcatttatgtc

SEQ ID NO: 2142734 - DNA, 15 bp, Homo sapiens
tcctcatttatgtca

SEQ ID NO: 2142735 - DNA, 15 bp, Homo sapiens
cctcatttatgtcaa

SEQ ID NO: 2142736 - DNA, 15 bp, Homo sapiens
ctcatttatgtcaat

SEQ ID NO: 2142737 - DNA, 15 bp, Homo sapiens
tcatttatgtcaatg

SEQ ID NO: 2142738 - DNA, 15 bp, Homo sapiens
catttatgtcaatgt

SEQ ID NO: 2142739 - DNA, 15 bp, Homo sapiens
atttatgtcaatgtc

SEQ ID NO: 2142740 - DNA, 15 bp, Homo sapiens
tttatgtcaatgtct

SEQ ID NO: 2142741 - DNA, 15 bp, Homo sapiens
ttatgtcaatgtctg

SEQ ID NO: 2142742 - DNA, 15 bp, Homo sapiens
tatgtcaatgtctgc

SEQ ID NO: 2142743 - DNA, 15 bp, Homo sapiens
atgtcaatgtctgct

SEQ ID NO: 2142744 - DNA, 15 bp, Homo sapiens
tgtcaatgtctgctt

SEQ ID NO: 2142745 - DNA, 15 bp, Homo sapiens
gtcaatgtctgcttt

SEQ ID NO: 2142746 - DNA, 15 bp, Homo sapiens
tcaatgtctgcttta

SEQ ID NO: 2142747 - DNA, 15 bp, Homo sapiens
caatgtctgctttaa

SEQ ID NO: 2142748 - DNA, 15 bp, Homo sapiens
aatgtctgctttaac

SEQ ID NO: 2142749 - DNA, 15 bp, Homo sapiens
atgtctgctttaact

SEQ ID NO: 2142750 - DNA, 15 bp, Homo sapiens
tgtctgctttaacta

SEQ ID NO: 2142751 - DNA, 15 bp, Homo sapiens
gtctgctttaactaa

SEQ ID NO: 2142752 - DNA, 15 bp, Homo sapiens
tctgctttaactaag

SEQ ID NO: 2142753 - DNA, 15 bp, Homo sapiens
ctgctttaactaagt

SEQ ID NO: 2142754 - DNA, 15 bp, Homo sapiens
tgctttaactaagtt

SEQ ID NO: 2142755 - DNA, 15 bp, Homo sapiens
gctttaactaagttc

SEQ ID NO: 2142756 - DNA, 15 bp, Homo sapiens
ctttaactaagttcc

SEQ ID NO: 2142757 - DNA, 15 bp, Homo sapiens
tttaactaagttcct

SEQ ID NO: 2142758 - DNA, 15 bp, Homo sapiens
ttaactaagttcctt

SEQ ID NO: 2142759 - DNA, 15 bp, Homo sapiens
taactaagttccttt

SEQ ID NO: 2142760 - DNA, 15 bp, Homo sapiens
aactaagttcctttg

SEQ ID NO: 2142761 - DNA, 15 bp, Homo sapiens
actaagttcctttgg

SEQ ID NO: 2142762 - DNA, 15 bp, Homo sapiens
ctaagttcctttggc

SEQ ID NO: 2142763 - DNA, 15 bp, Homo sapiens
taagttcctttggct

SEQ ID NO: 2142764 - DNA, 15 bp, Homo sapiens
aagttcctttggctt

SEQ ID NO: 2142765 - DNA, 15 bp, Homo sapiens
agttcctttggcttc

SEQ ID NO: 2142766 - DNA, 15 bp, Homo sapiens
gttcctttggcttca

SEQ ID NO: 2142767 - DNA, 15 bp, Homo sapiens
ttcctttggcttcat

SEQ ID NO: 2142768 - DNA, 15 bp, Homo sapiens
tcctttggcttcata

SEQ ID NO: 2142769 - DNA, 15 bp, Homo sapiens
cctttggcttcatat

SEQ ID NO: 2142770 - DNA, 15 bp, Homo sapiens
ctttggcttcatatc

SEQ ID NO: 2142771 - DNA, 15 bp, Homo sapiens
tttggcttcatatct

SEQ ID NO: 2142772 - DNA, 15 bp, Homo sapiens
ttggcttcatatcta

SEQ ID NO: 2142773 - DNA, 15 bp, Homo sapiens
tggcttcatatctat

SEQ ID NO: 2142774 - DNA, 15 bp, Homo sapiens
ggcttcatatctata

SEQ ID NO: 2142775 - DNA, 15 bp, Homo sapiens
gcttcatatctatat

SEQ ID NO: 2142776 - DNA, 15 bp, Homo sapiens
cttcatatctatata

SEQ ID NO: 2142777 - DNA, 15 bp, Homo sapiens
ttcatatctatatag

SEQ ID NO: 2142778 - DNA, 15 bp, Homo sapiens
tcatatctatatagc

SEQ ID NO: 2142779 - DNA, 15 bp, Homo sapiens
catatctatatagcc

SEQ ID NO: 2142780 - DNA, 15 bp, Homo sapiens
atatctatatagcct

SEQ ID NO: 2142781 - DNA, 15 bp, Homo sapiens
tatctatatagcctt

SEQ ID NO: 2142782 - DNA, 15 bp, Homo sapiens
atctatatagccttt

SEQ ID NO: 2142783 - DNA, 15 bp, Homo sapiens
tctatatagcctttc

SEQ ID NO: 2142784 - DNA, 15 bp, Homo sapiens
ctatatagcctttcc

SEQ ID NO: 2142785 - DNA, 15 bp, Homo sapiens
tatatagcctttcca

SEQ ID NO: 2142786 - DNA, 15 bp, Homo sapiens
atatagcctttccaa

SEQ ID NO: 2142787 - DNA, 15 bp, Homo sapiens
tatagcctttccaac

SEQ ID NO: 2142788 - DNA, 15 bp, Homo sapiens
atagcctttccaacc

SEQ ID NO: 2142789 - DNA, 15 bp, Homo sapiens
tagcctttccaacca

SEQ ID NO: 2142790 - DNA, 15 bp, Homo sapiens
agcctttccaaccag

SEQ ID NO: 2142791 - DNA, 15 bp, Homo sapiens
gcctttccaaccagt

SEQ ID NO: 2142792 - DNA, 15 bp, Homo sapiens
cctttccaaccagtg

SEQ ID NO: 2142793 - DNA, 15 bp, Homo sapiens
ctttccaaccagtga

SEQ ID NO: 2142794 - DNA, 15 bp, Homo sapiens
tttccaaccagtgaa

SEQ ID NO: 2142795 - DNA, 15 bp, Homo sapiens
ttccaaccagtgaaa

SEQ ID NO: 2142796 - DNA, 15 bp, Homo sapiens
tccaaccagtgaaag

SEQ ID NO: 2142797 - DNA, 15 bp, Homo sapiens
ccaaccagtgaaagt

SEQ ID NO: 2142798 - DNA, 15 bp, Homo sapiens
caaccagtgaaagtg

SEQ ID NO: 2142799 - DNA, 15 bp, Homo sapiens
aaccagtgaaagtgt

SEQ ID NO: 2142800 - DNA, 15 bp, Homo sapiens
accagtgaaagtgtc

SEQ ID NO: 2142801 - DNA, 15 bp, Homo sapiens
ccagtgaaagtgtca

SEQ ID NO: 2142802 - DNA, 15 bp, Homo sapiens
cagtgaaagtgtcaa

SEQ ID NO: 2142803 - DNA, 15 bp, Homo sapiens
agtgaaagtgtcaac

SEQ ID NO: 2142804 - DNA, 15 bp, Homo sapiens
gtgaaagtgtcaaca

SEQ ID NO: 2142805 - DNA, 15 bp, Homo sapiens
tgaaagtgtcaacat

SEQ ID NO: 2142806 - DNA, 15 bp, Homo sapiens
gaaagtgtcaacatt

SEQ ID NO: 2142807 - DNA, 15 bp, Homo sapiens
aaagtgtcaacattc

SEQ ID NO: 2142808 - DNA, 15 bp, Homo sapiens
aagtgtcaacattcc

SEQ ID NO: 2142809 - DNA, 15 bp, Homo sapiens
agtgtcaacattccc

SEQ ID NO: 2142810 - DNA, 15 bp, Homo sapiens
gtgtcaacattccca

SEQ ID NO: 2142811 - DNA, 15 bp, Homo sapiens
tgtcaacattcccac
